(19) United States
(12) Patent Application Publication
(10) Pub. No.: US 2021/0254166 A1
(43) Pub. Date: Aug. 19, 2021

(54) GENE SIGNATURES PREDICTIVE OF METASTATIC DISEASE

(71) Applicant: ALMAC DIAGNOSTICS LIMITED, Craigavon (GB)

(72) Inventors: Steven WALKER, Craigavon (GB); Laura HILL, Craigavon (GB); Andrena MCCAVIGAN, Derryadd (GB); Sinead DONEGAN, Belfast (GB); Timothy DAVISON, Hillsborough (GB); Richard KENNEDY, Belfast (GB); Denis Paul HARKIN, Dromore (GB); Bethanie PRICE, Craigavon (GB)

(73) Assignee: ALMAC DIAGNOSTICS LIMITED, Craigavon (GB)

(21) Appl. No.: 15/736,667

(22) PCT Filed: Jun. 17, 2016
(86) PCT No.: PCT/GB2016/051825

§ 371 Date: Dec. 14, 2017

(30) Foreign Application Priority Data
Jun. 17, 2015 (GB) 1510684.2

(51) Int. Cl. C12Q 1/6886

(52) U.S. Cl. CPC C12Q 1/6886; C12Q 2600/158; C12Q 2600/118

(57) ABSTRACT

Methods for characterising and/or prognosing cancer in a subject comprise determining the expression level of at least one, and preferably 12, genes selected from Table 1 in a sample from the subject wherein the determined expression level is used to provide a characterisation of and/or a prognosis for the cancer. Determined expression levels are used to generate a signature score. The methods permit metastatic disease to be identified and monitored and guide therapeutic interventions.

### FIELD OF THE INVENTION

[0001] The present invention relates to cancer and in particular to prostate cancer and ER positive breast cancer. Provided are methods for characterising and prognosing cancer and in particular prostate cancer and ER positive breast cancer. The methods utilize various biomarkers, specifically in the form of one or more gene signatures. Primers, probes, antibodies, kits, devices and systems useful in the methods are also described.

### BACKGROUND OF THE INVENTION

[0002] Prostate cancer is the most common malignancy in men with a lifetime incidence of 15.3% (Howlader 2012). Based upon data from 1999-2006 approximately 80% of prostate cancer patients present with early disease clinically confined to the prostate (Altekruse et al 2010) of which around 65% are cured by surgical resection or radiotherapy (Kattan et al 1999, Pound et al 1999). 35% will develop PSA recurrence of which approximately 35% will develop local or metastatic recurrence, which is non-curable. At present it is unclear which patients with early prostate cancer are likely to develop recurrence and may benefit from more intensive therapies. Current prognostic factors such as tumour grade as measured by Gleason score have prognostic value but a significant number of those considered lower grade (7 or less) still recur and a proportion of higher-grade tumours do not. Additionally there is significant heterogeneity in the prognosis of Gleason 7 tumours (Makarov et al 2002, Rasiah et al 2003). Furthermore it has become evident that the grading of Gleason score has changed leading to changes in the distribution of Gleason scores over time (Albertsen et al 2005, Smith et al 2002).

[0003] It is now clear that most solid tumours originating from the same anatomical site represent a number of distinct entities at a molecular level (Perou et al 2000). DNA microarray platforms allow the analysis of tens of thousands of transcripts simultaneously from archived paraffin embedded tissues and are ideally suited for the identification of molecular subgroups. This kind of approach has identified primary cancers with metastatic potential in solid tumours such as breast (van 't Veer et al 2002) and colon cancer (Bertucci et al 2004).

### DESCRIPTION OF THE INVENTION

[0004] The present invention is based upon the identification and verification of cancer biomarkers, particularly prognostic biomarkers that identify potentially metastatic cancers (such as prostate and ER positive breast cancers).

[0005] The present inventors have identified a group of primary prostate cancers that are similar to metastatic disease at a molecular level. Primary tumour samples which clustered with metastatic samples define a group with poor (bad) prognosis. These tumours may be defined by down regulation of genes associated with cell adhesion, cell differentiation and cell development. These tumours may be defined by up regulation of androgen related processes and epithelial to mesenchymal transition (EMT). In contrast, benign and primary like benign tumours cluster to define a group with improved (good) prognosis. A series of biomarker/gene signatures that can be used to prospectively identify tumours within either subgroup (i.e. with metastatic or non-metastatic biology) have been generated and validated which have prognostic power. The signatures can thus be used to prospectively assess a tumour's progression, for example to determine whether a tumour is at increased likelihood of recurrence and/or metastatic development. The signatures also display excellent performance in heterogeneity studies as discussed further herein. In particular, a 70 gene signature is described herein. The gene signatures are also shown to be effective in other cancer types including ER positive breast cancer, thus suggesting that the underlying molecular biology may have applicability in defining potentially metastatic primary tumours.

[0006] Thus, in a first aspect the invention provides a method for characterising and/or prognosing cancer, such as prostate cancer or ER positive breast cancer, in a subject comprising: determining the expression level of at least one gene from Table 1 in a sample from the subject wherein the determined expression level is used to provide a characterisation of and/or a prognosis for the cancer.

[0007] According to a further aspect of the invention there is provided a method for diagnosing (or identifying or characterizing) a cancer, such as prostate cancer or ER positive breast cancer, with an increased metastatic potential in a subject comprising:

[0008] determining the expression level of at least one gene from Table 1 in a sample from the subject wherein the determined expression level is used to identify whether a subject has a cancer, such as prostate cancer or ER positive breast cancer, with increased metastatic potential.

[0009] The invention also relates to a method for characterising and/or prognosing a cancer, such as prostate cancer or ER positive breast cancer in a subject comprising:

[0010] determining the expression level of at least one gene from Table 1 in a sample from the subject in order to identify the presence or absence of cells characteristic of an increased likelihood of recurrence and/or metastasis wherein the determined presence or absence of the cells is used to provide a characterisation of and/or a prognosis for the cancer, such as prostate cancer or ER positive breast cancer.

[0011] In a further aspect, the present invention relates to a method for characterising and/or prognosing a cancer, such as prostate cancer or ER positive breast cancer in a subject comprising:

[0012] a) obtaining a sample from the subject/in a sample obtained from the subject

[0013] b) applying a nucleic acid probe that specifically hybridizes with the nucleotide sequence of at least one gene or full sequence or target sequence selected from Table 1 to the sample from the subject

[0014] c) applying a detection agent that detects the nucleic acid probe-gene complex

[0015] d) using the detection agent to determine the level of the at least one gene or full sequence or target sequence

[0016] d) wherein the determined level of the at least one gene (or full sequence or target sequence) is used to provide a characterisation of and/or a prognosis for the cancer, such as prostate cancer or ER positive breast cancer. Suitable probes and probesets are listed in Table 1 and further details are provided in Table 1A.

[0017] In a further aspect, the present invention relates to a method for characterising and/or prognosing a cancer, such as prostate cancer or ER positive breast cancer in a subject comprising:

[0018] a) obtaining a sample from the subject/in a sample obtained from the subject

[0019] b) applying a set of nucleic acid primers that specifically hybridize with the nucleotide sequence of at least one gene or full sequence or target sequence selected from Table 1 to the sample from the subject

[0020] c) specifically amplifying the nucleotide sequence using the set of nucleic acid primers

[0021] d) detecting the amplification products using a specific detection agent to determine the level of the at least one gene or full sequence or target sequence

[0022] e) wherein the determined level of the at least one gene (or full sequence or target sequence) is used to provide a characterisation of and/or a prognosis for the cancer, such as prostate cancer or ER positive breast cancer. Suitable primers and primer pairs are listed in Table 1B.

[0023] The detection agent may comprise a label, such as a fluorescence label or fluorophore/quencher system attached to the nucleic acid probe and/or primer (as appropriate). Suitable systems and methodologies are known in the art and described herein.

[0024] The characterization, prognosis or diagnosis of the cancer, such as prostate cancer or ER positive breast cancer can also be used to guide treatment.

[0025] Accordingly, in a further aspect, the present invention relates to a method for selecting a treatment for a cancer, such as prostate cancer or ER positive breast cancer in a subject comprising:

[0026] (a) determining the expression level of at least one gene selected from Table 1 in a sample from the subject wherein the determined expression level is used to provide a characterisation of and/or a prognosis for the cancer, such as prostate cancer or ER positive breast cancer and

[0027] (b) selecting a treatment appropriate to the characterisation of and/or prognosis for the cancer, such as prostate cancer or ER positive breast cancer.

[0028] In yet a further aspect, the present invention relates to a method for selecting a treatment for a cancer, such as prostate cancer or ER positive breast cancer in a subject comprising:

[0029] (a) determining the expression level of at least one gene selected from Table 1 in a sample from the subject wherein the determined expression level is used to provide a characterisation of and/or a prognosis for the cancer, such as prostate cancer or ER positive breast cancer

[0030] (b) selecting a treatment appropriate to the characterisation of and/or prognosis for the cancer, such as prostate cancer or ER positive breast cancer and

[0031] (c) treating the subject with the selected treatment.

[0032] The invention also relates to a method of treating cancer, such as prostate cancer or ER positive breast cancer comprising administering a chemotherapeutic agent or radiotherapy, optionally extended radiotherapy, preferably extended-field radiotherapy, to a subject or carrying out surgery on a subject wherein the subject is selected for treatment on the basis of a method as described herein.

[0033] In a further aspect, the present invention relates to a chemotherapeutic agent for use in treating a cancer, such as prostate cancer or ER positive breast cancer in a subject, wherein the subject is selected for treatment on the basis of a method as described herein.

[0034] In yet a further aspect, the present invention relates to method of treating a cancer, such as prostate cancer or ER positive breast cancer comprising administering a chemotherapeutic agent or radiotherapy, optionally extended radiotherapy, preferably extended-field radiotherapy to a subject or carrying out surgery on a subject wherein the subject has an increased expression level of at least one gene with a positive weight selected from Table 1 and/or wherein the subject has a decreased expression level of at least one gene with negative weight selected from Table 1.

[0035] The invention also relates to a chemotherapeutic agent for use in treating a cancer, such as prostate cancer or ER positive breast cancer in a subject, wherein the subject has an increased expression level of at least one gene with a positive weight selected from Table 1 and/or wherein the subject has a decreased expression level of at least one gene with a negative weight selected from Table 1.

[0036] In certain embodiments according to all relevant aspects of the invention the chemotherapeutic agent comprises, consists essentially of or consists of

[0037] a) an anti-hormone treatment, preferably bicalutamide and/or abiraterone

[0038] b) a cytotoxic agent

[0039] c) a biologic, preferably an antibody and/or a vaccine, more preferably Sipuleucel-T and/or

[0040] d) a targeted therapeutic agent

[0041] Suitable therapies and therapeutic agents are discussed in further detail herein. The treatment may comprise or be adjuvant therapy in some embodiments.

[0042] According to all aspects of the invention the cancer may be a prostate cancer or ER positive breast cancer. Typically, the cancer is a primary tumor. In some embodiments, the prostate cancer may be a primary prostate cancer.

[0043] It is shown herein that the gene signatures may have particularly advantageous utility when combined with determination of other prognostic factors. Thus, all aspects of the invention may include other prognostic factors in the characterization, diagnosis or prognosis of the cancer. This may comprise generation of a combined risk score. This is particularly applicable in the context of prostate cancer. Other prognostic factors include prostate specific antigen (PSA) levels and/or Gleason score. MRI scan results may also be taken into account. Thus, according to all aspects of the invention, characterization, prognosis or diagnosis may take into account other prognostic factors such as PSA levels and/or Gleason score. PSA is a well-known serum biomarker and may be used according to the invention, in particular when measured pre-operatively. For example, a PSA value of 4-10 ng/ml may be considered “low risk”. A PSA value of 10-20 ng/ml may be considered reflective of “medium risk”. A PSA value of 20 ng/ml or more may be considered reflective of “high risk”. High risk would correspond to poor prognosis and/or be indicative of aggressive disease. Levels of PSA may contribute towards a final characterization of the cancer in combination with the measured expression levels. Medium risk PSA levels when combined with a positive or high signature score may indicate poor prognosis.

[0044] The Gleason system is used to grade prostate tumours with a score from 2 to 10, where a Gleason score of 10 indicates the most abnormalities. Cancers with a higher Gleason score are more aggressive and have a worse prognosis. The system is based on how the prostate cancer tissue appears under a microscope and indicates how likely it is that a tumour will spread. A low Gleason score means the cancer tissue is similar to normal prostate tissue and the tumour is less likely to spread; a high Gleason score means the cancer tissue is very different from normal and the tumour is more likely to spread. Gleason scores are calculated by adding the score of the most common grade (primary grade pattern) and the second most common grade (secondary grade pattern) of the cancer cells. Where more than two grades are observed the primary grade is added to the worst observable grade to arrive at the Gleason score. Grades are assigned using the 2005 (amended in 2009) International Society of Urological Pathology (ISUP) Consensus Conference on Gleason Grading of Prostatic Carcinoma. Thus, in some embodiments, a Gleason score of 7 or more contributes to a characterization of poor prognosis. In such embodiments, a Gleason score of less than 7 may contribute to a characterization of good prognosis. In some embodiments, a Gleason score of 7 is classified as an intermediate position between good and poor prognosis. Thus, a Gleason score of 8 or more is classified as poor prognosis. A Gleason score of less than 7 may contribute to a characterization of good prognosis. In some embodiments, a Gleason score of 7 thus contributes less to a characterization of poor prognosis than does a Gleason score of 8 or more, but more than a Gleason score of 6 or less. A Gleason score of 7 when combined with a positive or high signature score may indicate poor prognosis.

[0045] Where both Gleason score and PSA levels contribute to the characterization of the cancer, they may be weighted relative to one another. Typically, Gleason score is given greater significance than PSA levels. Thus, for example a Gleason score indicative of poor prognosis in combination with PSA levels associated with low risk, or good prognosis, may still result in a conclusion of poor prognosis (depending upon the measured expression levels of the gene or genes from Table 1). Similar considerations may apply to MRI results, which may be given greater weight than PSA levels in making the final characterization of the cancer.

[0046] The genes which may be included in suitable gene signatures and their identifying information are described and defined in further detail in Table 1 below. The genes may also be referred to, interchangeably, as biomarkers. Full sequences, against which suitable expression level determination assays may be designed, are also indicated in the table. Similarly, target sequences, against which suitable expression level determination assays may be designed, are also indicated in the table. Probe sequences interrogating the target sequences are also provided. Each sequence type is useful in the performance of the invention and form a separate aspect thereof.

TABLE 1

| Signature | Signature | Weight | Rank by | Gene | | SEQ ID NO of sequence | | |
|---|---|---|---|---|---|---|---|---|
| Weight | Bias | (absolute) | weight | symbol | Probesets | Full | Target | Probe |
| −0.01089888 | 4.440873234 | 0.01089888 | 1 | CAPN6 | 3Snip.7769-1124a_at | 15 | 247 | 619-629 |
| −0.009631509 | 6.912586369 | 0.009631509 | 2 | THBS4 | PC3P.12363.C1_s_at | 28 | 260 | 750-760 |
| −0.008885735 | 4.383572327 | 0.008885735 | 3 | PLP1 | PC3P.17142.C1_s_at | 64 | 296 | 1143-1153 |
| | | | | | PCADA.12738_s_at | 168 | 400 | 2298-2308 |
| −0.008680747 | 6.747956978 | 0.008680747 | 4 | MT1A | ‘PCRS3.3951_at’ | 231 | 463 | 2994-3003 |
| | | | | | ‘PCRS3.3951_x_at’ | 232 | 464 | 3004-3014 |
| −0.008278545 | 7.215245389 | 0.008278545 | 5 | MIR205HG | ‘PC3P.1643.C1_s_at’ | 54 | 286 | 1033-1043 |
| | | | | | ‘PC3P.1643.C4-370a_s_at’ | 55 | 287 | 1044-1054 |
| | | | | | ‘PC3P.1643.C6-335a_s_at’ | 56 | 288 | 1055-1065 |
| | | | | | ‘PCRS2.3147_x_at’ | 227 | 459 | 2952-2962 |
| −0.007934619 | 4.230422622 | 0.007934619 | 6 | SEMG1 | ‘3Snip.972-5a_s_at’ | 16 | 248 | 630-640 |
| −0.007295796 | 4.293172794 | 0.007295796 | 7 | RSPO3 | ‘3Snip.465-263a_s_at’ | 8 | 240 | 552 |
| | | | | | ‘PCRS2.4412_s_at’ | 228 | 460 | 2963-2971 |
| −0.007164357 | 6.522547774 | 0.007164357 | 8 | ANO7 | ‘PC3P.1358.C1_at’ | 37 | 269 | 849-859 |
| | | | | | ‘PC3P.1358.C1-1172a_s_at’ | 38 | 270 | 860-870 |
| | | | | | ‘PC3SNG.1742-20a_s_at’ | 125 | 357 | 1825-1835 |
| | | | | | ‘PCHP.560_s_at’ | 205 | 437 | 2715-2724 |
| | | | | | ‘PCHP.564_s_at’ | 206 | 438 | 2725-2735 |
| −0.007138975 | 7.621758138 | 0.007138975 | 9 | PCP4 | ‘PC3P.11557.C1_s_at’ | 23 | 255 | 696-706 |
| −0.006922498 | 5.92831485 | 0.006922498 | 10 | ANKRD1 | ‘PC3SNG.1549-27a_s_at’ | 124 | 356 | 1814-1824 |
| −0.006844539 | 4.574318807 | 0.006844539 | 11 | MYBPC1 | ‘PC3P.13654.C1_at’ | 39 | 271 | 871-881 |
| | | | | | ‘PC3P.13654.C1_x_at’ | 40 | 272 | 882-892 |
| | | | | | ‘PC3P.3003.C1_s_at | 74 | 306 | 1253-1263 |
| | | | | | ‘PC3P.3003.C1_x_at’ | 75 | 307 | 1264-1274 |
| | | | | | ‘PC3P.7685.C1_at’ | 101 | 333 | 1550-1560 |
| | | | | | ‘PC3P.7685.C1_x_at’ | 102 | 334 | 1561-1571 |
| | | | | | ‘PC3P.7685.C1-693a_s_at’ | 103 | 335 | 1572-1582 |
| | | | | | ‘PC3SNGnh.274_x_at’ | 144 | 376 | 2034-2044 |
| −0.00683545 | 6.756722063 | 0.00683545 | 12 | MMP7 | ‘PC3P.2763.C1_s_at’ | 71 | 303 | 1220-1230 |
| −0.006830879 | 5.745461752 | 0.006830879 | 13 | SERPINA3 | ‘PC3P.104.CB1_s_at’ | 19 | 251 | 663-673 |
| −0.006809804 | 5.977682143 | 0.006809804 | 14 | SELE | ‘PCHP.1458_s_at’ | 199 | 431 | 2639-2649 |
| −0.006402712 | 6.080493983 | 0.006402712 | 15 | KRT5 | ‘PC3P.10239.C1_s_at’ | 17 | 249 | 641-651 |
| | | | | | ‘PC3P.167.C1_s_at’ | 61 | 293 | 1110-1120 |
| | | | | | ‘PC3P.9581.C1_x_at’ | 118 | 350 | 1737-1747 |
| −0.006400452 | 6.497259991 | 0.006400452 | 16 | LTF | ‘PC3SNG.1467-30a_s_at’ | 123 | 355 | 1803-1813 |
| −0.006380629 | 3.55996601 | 0.006380629 | 17 | KIAA1210 | ‘PC3P.12920.C1_x_at’ | 34 | 266 | 816-826 |
| −0.006312212 | 8.063421249 | 0.006312212 | 18 | TMEM158 | ‘PCADA.9364_s_at’ | 177 | 409 | 2397-2407 |
| −0.006271047 | 9.96082669 | 0.006271047 | 19 | ZFP36 | ‘PCHP.1147_s_at’ | 196 | 428 | 2606-2407 |
| −0.006108115 | 6.954936015 | 0.006108115 | 20 | FOSB | ‘PC3P.1906.C1_s_at’ | 65 | 297 | 1154-1164 |
| | | | | | ‘PC3P.1906.C1-568a_s_at’ | 66 | 298 | 1165-1175 |
| | | | | | ‘PCEM.1525_s_at’ | 192 | 424 | 2562-2572 |
| | | | | | ‘PCPD.3244.C1_s_at’ | 217 | 449 | 2845-2853 |
| −0.006101922 | 5.262341585 | 0.006101922 | 21 | PCA3 | ‘3Snip.6683-12a_x_at’ | 12 | 244 | 586-596 |
| | | | | | ‘PC3P.11294.C1_s_at’ | 22 | 254 | 685-695 |
| | | | | | ‘PC3P.13143.C1_at’ | 35 | 267 | 827-837 |
| | | | | | ‘PC3P.13143.C1_x_at’ | 36 | 268 | 838-848 |
| | | | | | ‘PC3P.2274.C1_s_at’ | 67 | 299 | 1176-1186 |
| | | | | | ‘PC3P.5053.C1_s_at’ | 88 | 320 | 1407-1417 |
| | | | | | ‘PC3P.5053.C1-490a_s_at’ | 89 | 321 | 1418-1428 |
| | | | | | ‘PC3SNGnh.932_x_at’ | 163 | 395 | 2243-2253 |
| −0.006059944 | 4.865791397 | 0.006059944 | 22 | TRPM8 | ‘PC3P.12013.C1_s_at’ | 24 | 256 | 707-717 |
| | | | | | ‘PC3P.12591.C1_x_at’ | 29 | 261 | 761-771 |
| | | | | | ‘PC3P.1261.C1_s_at’ | 30 | 262 | 772-782 |
| | | | | | ‘PC3P.1507.C1_at’ | 45 | 277 | 934-944 |
| | | | | | ‘PC3P.1507.C1_x_at’ | 46 | 278 | 945-955 |
| | | | | | ‘PC3P.3670.C1_s_at’ | 78 | 310 | 1297-1307 |
| | | | | | ‘PC3P.3670.C1-625a_s_at’ | 79 | 311 | 1308-1318 |
| | | | | | ‘PC3P.3670.C2_s_at’ | 80 | 312 | 1319-1329 |
| | | | | | ‘PC3SNGnh.1467_at’ | 137 | 369 | 1957-1967 |
| | | | | | ‘PC3SNGnh.1467_x_at’ | 138 | 370 | 1968-1978 |
| | | | | | ‘PC3SNGnh.2659_at’ | 143 | 375 | 2023-2033 |
| | | | | | ‘PC3SNGnh.3350_at’ | 145 | 377 | 2045-2055 |
| | | | | | ‘PC3SNGnh.3350_x_at’ | 146 | 378 | 2056-2066 |
| | | | | | ‘PC3SNGnh.5454_at’ | 159 | 391 | 2199-2209 |
| 0.006017344 | 4.712692803 | 0.006017344 | 23 | PTTG1 | ‘PC3P.16730.C1_x_at’ | 62 | 294 | 1121-1131 |
| | | | | | ‘PCHP.233_x_at’ | 201 | 433 | 2661-2671 |
| −0.005950381 | 4.980380941 | 0.005950381 | 24 | N/A | ‘PC3P.12756.C1_x_at’ | 32 | 264 | 794-804 |
| | | | | | ‘PC3P.5784.C1_at’ | 96 | 328 | 1495-1505 |
| | | | | | ‘PC3P.5784.C1_x_at’ | 97 | 329 | 1506-1516 |
| | | | | | ‘PC3P.8725.C1_at’ | 112 | 344 | 1671-1681 |
| | | | | | ‘PC3P.8725.C1_x_at’ | 113 | 345 | 1682-1692 |
| | | | | | ‘PC3P.8968.C1_s_at’ | 114 | 346 | 1693-1703 |
| | | | | | PC3P.9903.C1_at’ | 120 | 352 | 1759-1769 |
| | | | | | ‘PC3P.9903.C1_x_at’ | 121 | 353 | 1770-1780 |
| | | | | | ‘PC3SNG.6387-29a_x_at’ | 132 | 364 | 1902-1912 |
| | | | | | ‘PC3SNGnh.148_x_at’ | 141 | 373 | 2001-2011 |
| | | | | | ‘PC3SNGnh.3957_at’ | 149 | 381 | 2089-2099 |
| | | | | | ‘PCADNP.3640_at’ | 185 | 417 | 2485-2495 |
| | | | | | ‘PCADNP.3640_x_at’ | 186 | 418 | 2496-2506 |
| | | | | | ‘PCPD.14169.C1_at’ | 210 | 442 | 2769-2779 |
| | | | | | ‘PCPD.14169.C1_x_at’ | 211 | 443 | 2780-2790 |
| | | | | | ‘PCPD.20005.C1_at’ | 213 | 445 | 2801-2811 |
| | | | | | ‘PCPD.20005.C1_x_at’ | 214 | 446 | 2812-2822 |
| | | | | | ‘PCPD.5961.C1_at’ | 221 | 453 | 2887-2897 |
| −0.005837135 | 7.07390658 | 0.005837135 | 25 | PAGE4 | ‘PCHP.651_s_at’ | 208 | 440 | 2747-2757 |
| −0.005684812 | 8.105295362 | 0.005684812 | 26 | STEAP4 | ‘3Snip.1577-444a_s_at’ | 1 | 233 | 465-475 |
| | | | | | ‘PC3P.2452.C1_s_at’ | 68 | 300 | 1187-1197 |
| | | | | | ‘PC3P.2452.C1-520a_s_at’ | 69 | 301 | 1198-1208 |
| | | | | | ‘PC3SNG.3670-154a_s_at’ | 129 | 361 | 1869-1879 |
| −0.00564663 | 7.59452596 | 0.00564663 | 27 | TMEM178A | ‘PC3P.2736.C1_at’ | 70 | 302 | 1209-1219 |
| −0.005597719 | 8.928977514 | 0.005597719 | 28 | CXCL2 | ‘PCHP.412_x_at’ | 203 | 435 | 2693-2703 |
| −0.005593197 | 4.232781732 | 0.005593197 | 29 | HS3ST3A1 | ‘3Snip.377-232a_s_at’ | 6 | 238 | 520-530 |
| | | | | | ‘PCADA.12209_at’ | 166 | 398 | 2276-2286 |
| | | | | | ‘PCADA.12209_x_at’ | 167 | 399 | 2287-2297 |
| −0.005581031 | 5.504276204 | 0.005581031 | 30 | EYA1 | ‘3Snip.546-712a_s_at’ | 10 | 242 | 564-574 |
| | | | | | ‘PC3P.4095.C1_at’ | 82 | 314 | 1341-1351 |
| | | | | | ‘PC3P.4095.C1_x_at’ | 83 | 315 | 1352-1362 |
| | | | | | ‘PC3SNGnh.4553_s_at’ | 151 | 383 | 2111-2121 |
| | | | | | PCPD.3722.C1_s_at’ | 218 | 450 | 2854-2864 |
| −0.005562783 | 3.922420794 | 0.005562783 | 31 | RSPO2 | ‘PC3P.16583.C1_at’ | 59 | 291 | 1088-1098 |
| | | | | | ‘PC3P.16583.C1_x_at’ | 60 | 292 | 1099-1109 |
| −0.005553136 | 5.912186171 | 0.005553136 | 32 | PKP1 | ‘3Snip.4433-2675a_s_at’ | 7 | 239 | 531-541 |
| | | | | | ‘PC3P.6847.C1_s_at’ | 98 | 330 | 1517-1527 |
| −0.005522157 | 6.640037274 | 0.005522157 | 33 | MUC6 | ‘PC3P.15628.C1_s_at’ | 50 | 282 | 989-999 |
| −0.005505761 | 4.514855049 | 0.005505761 | 34 | PENK | ‘PCADNP.9049_s_at’ | 190 | 422 | 2540-2550 |
| | | | | | ‘PCRS2.6477_s_at’ | 229 | 461 | 2972-2982 |
| −0.005399899 | 6.825490924 | 0.005399899 | 35 | DEFB1 | ‘3Snip.1845-41a_x_at’ | 2 | 234 | 476-486 |
| | | | | | ‘3Snip.5724-41a_s_at’ | 11 | 243 | 575-585 |
| −0.005389518 | 4.64900363 | 0.005389518 | 36 | SLC7A3 | ‘PCADA.10459_at’ | 164 | 396 | 2254-2264 |
| −0.00535523 | 5.08738932 | 0.00535523 | 37 | MIR578 | ‘PC3SNGnh.4158_at’ | 150 | 382 | 2100-2110 |
| −0.005263663 | 4.858716243 | 0.005263663 | 38 | PI15 | ‘3Snip.2873-1277a_at’ | 4 | 236 | 498-508 |
| | | | | | PC3P.7245.C1_at’ | 99 | 331 | 1528-1538 |
| | | | | | PC3P.7245.C1_x_at’ | 100 | 332 | 1539-1549 |
| | | | | | ‘PC3P.8311.C1_x_at’ | 110 | 342 | 1649-1659 |
| | | | | | ‘PC3P.8311.C1-482a_s_at’ | 111 | 343 | 1660-1670 |
| | | | | | ‘PCADNP.17332_s_at’ | 182 | 414 | 2452-2462 |
| −0.005259309 | 6.065877615 | 0.005259309 | 39 | UBXN10-AS1 | ‘PCPD.39829.C1_s_at’ | 219 | 451 | 2865-2875 |
| −0.00524875 | 4.174094312 | 0.00524875 | 40 | PDK4 | ‘PC3P.16300.C1_at’ | 52 | 284 | 1011-1021 |
| | | | | | ‘PC3P.16300.C1_x_at’ | 53 | 285 | 1022-1032 |
| | | | | | ‘PC3P.16894.C1_x_at’ | 63 | 295 | 1132-1142 |
| | | | | | ‘PC3P.8159.C1_s_at’ | 108 | 340 | 1627-1637 |
| | | | | | ‘PC3P.8159.C1-773a_s_at’ | 109 | 341 | 1638-1648 |
| | | | | | ‘PC3SNGnh.4912_at’ | 152 | 384 | 2122-2132 |
| | | | | | ‘PC3SNGnh.4912_x_at’ | 153 | 385 | 2133-2143 |
| | | | | | ‘PC3SNGnh.5369_at’ | 157 | 389 | 2177-2187 |
| | | | | | ‘PC3SNGnh.5369_x_at’ | 158 | 390 | 2188-2198 |
| | | | | | ‘PCADNP.18913_s_at’ | 184 | 416 | 2474-2484 |
| | | | | | ‘PCEM.2221_at’ | 194 | 426 | 2584-2594 |
| | | | | | ‘PCPD.29484.C1_at’ | 216 | 448 | 2834-2844 |
| −0.0052075 | 5.183571143 | 0.0052075 | 41 | PHGR1 | ‘3Snip.3288-5a_x_at’ | 5 | 237 | 509-519 |
| −0.005194886 | 6.691866284 | 0.005194886 | 42 | SERPINE1 | ‘3Snip.7067-10a_s_at | 13 | 245 | 597-607 |
| | | | | | ‘3Snip.7068-570a_s_at’ | 14 | 246 | 608-618 |
| | | | | | ‘PC3P.3933.C1_s_at’ | 81 | 313 | 1330-1340 |
| | | | | | ‘PC3P.9147.C1_s_at’ | 115 | 347 | 1704-1714 |
| | | | | | ‘PCADNP.4300_x_at’ | 187 | 419 | 2507-2517 |
| | | | | | ‘PCHP.1474_s_at’ | 200 | 432 | 2650-2660 |
| −0.005146623 | 4.752327652 | 0.005146623 | 43 | PDZRN4 | ‘PC3P.15181.C1_at’ | 47 | 279 | 956-966 |
| | | | | | ‘PC3P.15181.C1_s_at’ | 48 | 280 | 967-977 |
| | | | | | ‘PC3P.15181.C1_x_at’ | 49 | 281 | 978-988 |
| | | | | | ‘PC3P.16541.C1_at’ | 50 | 290 | 1077-1087 |
| −0.005105327 | 6.90054422 | 0.005105327 | 44 | ZNF185 | ‘PCHP.120_s_at’ | 198 | 430 | 2628-2638 |
| −0.005054713 | 7.078376864 | 0.005054713 | 45 | ADRA2C | ‘PCADA.8850_s_at’ | 176 | 408 | 2385-2396 |
| −0.0050184 | 8.191177501 | 0.0050184 | 46 | AZGP1 | ‘PC3P.122.CB1_x_at’ | 26 | 258 | 729-739 |
| | | | | | ‘PC3P.122.CB2_at’ | 27 | 259 | 740-749 |
| | | | | | ‘PC3SNG.1055-28a_x_at’ | 122 | 354 | 1792-1802 |
| 0.004965887 | 5.58133457 | 0.004965887 | 47 | TK1 | ‘PCHP.1153_s_at’ | 197 | 429 | 2617-2627 |
| −0.004961473 | 4.824976325 | 0.004961473 | 48 | POTEH | ‘PC3SNGnh.3389_at’ | 147 | 379 | 2067-2077 |
| | | | | | ‘PC3SNGnh.3389_x_at’ | 148 | 380 | 2078-2088 |
| | | | | | ‘PCPD.5859.C2_at’ | 220 | 452 | 2876-2886 |
| | | | | | ‘PCRS.626_x_at’ | 224 | 456 | 2920-2930 |
| 0.004928774 | 3.917668501 | 0.004928774 | 49 | KIF11 | ‘PCADNP.16534_at’ | 180 | 412 | 2430-2440 |
| | | | | | ‘PCADNP.16534_x_at’ | 181 | 413 | 2441-2451 |
| −0.004924383 | 4.960282713 | 0.004924383 | 50 | CLDN1 | ‘PC3P.2825.C1_at’ | 72 | 304 | 1231-1241 |
| | | | | | ‘PC3P.2825.C1_x_at’ | 73 | 305 | 1242-1252 |
| | | | | | ‘PC3SNGnh.7327_x_at’ | 162 | 394 | 2232-2242 |
| | | | | | ‘PCADA.12072_at’ | 165 | 397 | 2265-2275 |
| | | | | | ‘PCADA.7259_at’ | 172 | 404 | 2342-2352 |
| | | | | | ‘PCADA.7259_x_at’ | 173 | 405 | 2353-2363 |
| −0.004907676 | 10.53645223 | 0.004907676 | 51 | MIR4530 | ‘PCPD.1539.C1_s_at’ | 212 | 444 | 2791-2800 |
| −0.004901224 | 8.497945251 | 0.004901224 | 52 | MAFF | ‘PC3P.12787.C1_x_at’ | 33 | 265 | 805-815 |
| | | | | | ‘PCADA.13348_at’ | 169 | 401 | 2309-2319 |
| | | | | | ‘PCADA.13348_x_at’ | 170 | 402 | 2320-2330 |
| −0.004861949 | 3.976333034 | 0.004861949 | 53 | ZNF765 | ‘PC3P.3163.C1_s_at’ | 76 | 308 | 1275-1285 |
| | | | | | ‘PCRS.812_s_at’ | 225 | 457 | 2931-2941 |
| 0.00485589 | 6.503980715 | 0.00485589 | 54 | CKS2 | ‘PCHP.43_s_at’ | 204 | 436 | 2704-2714 |
| −0.004855875 | 4.819327983 | 0.004855875 | 55 | TCEAL7 | ‘PCADA.8842_at’ | 174 | 406 | 2364-2373 |
| 0.004830634 | 4.629391793 | 0.004830634 | 56 | PLIN1 | ‘PC3P.12706.C1_s_at’ | 31 | 263 | 783-793 |
| 0.004772601 | 5.503752383 | 0.004772601 | 57 | SIGLEC1 | ‘PC3SNG.5215-18a_s_at’ | 131 | 363 | 1891-1901 |
| −0.004772585 | 6.664595224 | 0.004772585 | 58 | FAM150B | ‘PCRS2.7477_s_at’ | 230 | 462 | 2983-2993 |
| −0.004771653 | 4.129176546 | 0.004771653 | 59 | MFAP5 | ‘3Snip.4760-1950a_s_at’ | 9 | 241 | 553-563 |
| | | | | | ‘PC3SNG.4407-18a_s_at’ | 130 | 362 | 1880-1890 |
| −0.004761531 | 7.901261944 | 0.004761531 | 60 | SFRP1 | ‘PC3P.9317.C1_s_at’ | 116 | 348 | 1715-1725 |
| | | | | | ‘PC3SNG.1958-2386a_s_at’ | 126 | 358 | 1836-1846 |
| −0.00471806 | 5.762677834 | 0.00471806 | 61 | DUSP5 | ‘PC3P.1626.C1_s_at’ | 51 | 283 | 1000-1010 |
| | | | | | ‘PCPD.2281.C1_at’ | 215 | 447 | 2823-2833 |
| | | | | | ‘PCRS2.2880_s_at’ | 226 | 458 | 2942-2951 |
| 0.004675188 | 5.223455192 | 0.004675188 | 62 | VARS2 | ‘PC3P.4347.C1_s_at’ | 84 | 316 | 1363-1373 |
| −0.004664227 | 5.230376747 | 0.004664227 | 63 | ABCC4 | ‘PC3P.3552.C1_s_at’ | 77 | 309 | 1286-1296 |
| | | | | | ‘PC3P.4471.C1_s_at’ | 85 | 317 | 1374-1384 |
| | | | | | ‘PC3P.4471.C1-536a_s_at’ | 86 | 318 | 1385-1395 |
| | | | | | ‘PC3P.5711.C1_at’ | 92 | 324 | 1451-1461 |
| | | | | | ‘PC3P.5711.C1_s_at’ | 93 | 325 | 1462-1472 |
| | | | | | ‘PC3P.5711.C2_at’ | 94 | 326 | 1473-1483 |
| | | | | | ‘PC3P.5711.C2_x_at’ | 95 | 327 | 1484-1494 |
| | | | | | ‘PC3P.777.C1_at’ | 104 | 336 | 1583-1593 |
| | | | | | ‘PC3P.777.C1_x_at’ | 105 | 337 | 1594-1564 |
| | | | | | ‘PC3P.9828.C1_s_at’ | 119 | 351 | 1748-1758 |
| | | | | | ‘PC3SNG.704-22a_s_at’ | 134 | 366 | 1924-1934 |
| | | | | | ‘PC3SNGnh.141_x_at’ | 136 | 368 | 1946-1946 |
| | | | | | ‘PC3SNGnh.1473_at’ | 139 | 371 | 1979-1989 |
| | | | | | ‘PC3SNGnh.1473_x_at’ | 140 | 372 | 1990-2000 |
| | | | | | ‘PC3SNGnh.6624_x_at’ | 160 | 392 | 2210-2220 |
| | | | | | ‘PC3SNGnh.6679_s_at’ | 161 | 393 | 2221-2231 |
| | | | | | ‘PCADA.445_s_at’ | 171 | 403 | 2331-2341 |
| | | | | | ‘PCADNP.1146_s_at’ | 178 | 410 | 2408-2418 |
| | | | | | ‘PCADNP.12255_at’ | 179 | 411 | 2419-2429 |
| | | | | | PCPD.7116.C1_at’ | 222 | 454 | 2898-2908 |
| | | | | | ‘PCPD.7116.C1_x_at’ | 223 | 455 | 2909-2919 |
| −0.004622969 | 4.882708067 | 0.004622969 | 64 | SH3BP4 | ‘PC3P.12104.C1_at’ | 25 | 257 | 718-728 |
| | | | | | ‘PC3P.14133.C1_at’ | 41 | 273 | 893-903 |
| | | | | | ‘PC3P.14133.C1_x_at’ | 42 | 274 | 904-914 |
| | | | | | ‘PC3SNGnh.1032_x_at’ | 135 | 367 | 1935-1945 |
| | | | | | ‘PC3SNGnh.1675_x_at’ | 142 | 374 | 2012-2022 |
| | | | | | ‘PC3SNGnh.4946_at’ | 154 | 386 | 2144-2154 |
| | | | | | ‘PC3SNGnh.4946_x_at’ | 155 | 387 | 2155-2165 |
| | | | | | ‘PC3SNGnh.5297_x_at’ | 156 | 388 | 2166-2176 |
| | | | | | ‘PCADNP.6193_s_at’ | 189 | 421 | 2529-2539 |
| −0.004573155 | 8.958411069 | 0.004573155 | 65 | SORD | ‘PC3P.14629.C1_s_at’ | 44 | 276 | 926-933 |
| | | | | | ‘PC3P.525.CB1_s_at’ | 90 | 322 | 1429-1439 |
| | | | | | ‘PC3P.525.CB1-789a_s_at’ | 91 | 323 | 1440-1450 |
| | | | | | ‘PC3P.9417.C1_s_at’ | 117 | 349 | 1726-1736 |
| 0.004522466 | 5.334198783 | 0.004522466 | 66 | MTERFD1 | ‘PC3P.14465.C1_s_at’ | 43 | 275 | 915-925 |
| −0.004505906 | 4.65974831 | 0.004505906 | 67 | DPP4 | ‘3Snip.2321-634a_s_at’ | 3 | 235 | 487-497 |
| | | | | | ‘PC3P.11025.C1_s_at’ | 21 | 253 | 674-684 |
| | | | | | ‘PC3P.4974.C1_s_at’ | 87 | 319 | 1396-1406 |
| | | | | | ‘PCADNP.9181_at’ | 191 | 423 | 2551-2661 |
| | | | | | ‘PCEM.2151_at’ | 193 | 425 | 2573-2583 |
| | | | | | ‘PCHP.235_s_at’ | 202 | 434 | 2672-2682 |
| 0.004502134 | 4.905312692 | 0.004502134 | 68 | N/A | ‘PC3SNG.6626-95a_s_at’ | 133 | 365 | 1913-1923 |
| −0.0044434 | 7.388071281 | 0.0044434 | 69 | FAM3B | ‘PC3P.8122.C1_s_at’ | 106 | 338 | 1605-1615 |
| | | | | | ‘PC3P.8122.C2_s_at’ | 107 | 339 | 1616-1626 |
| | | | | | ‘PCADNP.5263_s_at’ | 188 | 420 | 2518-2528 |
| −0.00442472 | 10.22644129 | 0.00442472 | 70 | KLK3 | ‘PC3P.1038.C2_s_at’ | 18 | 250 | 652-662 |
| | | | | | ‘PCADNP.18829_x_at’ | 183 | 415 | 2463-2473 |
| | | | | | ‘PCEM.799_x_at’ | 195 | 427 | 2595-2605 |
| | | | | | ‘PCHP.604_x_at’ | 207 | 439 | 2736-2746 |
| | | | | | ‘PCHP.785_s_at’ | 209 | 441 | 2758-2768 |

[0047] Further details of the probesets can be found in Table 1A, including orientation information:

TABLE 1A
Probeset Information

| | | | | | | HGNC | | |
|---|---|---|---|---|---|---|---|---|
| | | | ENSEMBL | Gene | Entrez | symbol | | Csome |
| Probeset ID | Orientation | NoPA | gene no. | Symbol | Gene ID | acc no | Strand | no |
| 3Snip.1577-444a_s_at | Fully Exonic | 11 | ENSG00000127954 | STEAP4 | 79689 | 21923 | Reverse | 7 |
| 3Snip.1845-41a_x_at | Fully Exonic | 11 | ENSG00000164825 | DEFB1 | 1672 | 2766 | Reverse | 8 |
| 3Snip.2321-634a_s_at | Fully Exonic | 11 | ENSG00000197635 | DPP4 | 1803 | 3009 | Reverse | 2 |
| 3Snip.2873-1277a_at | Fully Exonic | 11 | ENSG00000137558 | PI15 | 51050 | 8946 | Forward | 8 |
| 3Snip.3288-5a_x_at | Fully Exonic | 11 | ENSG00000233041 | PHGR1 | 644844 | 37226 | Forward | 15 |
| 3Snip.377-232a_s_at | Fully Exonic | 11 | ENSG00000153976 | HS3ST3A1 | 9955 | 5196 | Reverse | 17 |
| 3Snip.4433-2675a_s_at | Fully Exonic | 10 | ENSG00000081277 | PKP1 | 5317 | 9023 | Forward | 1 |
| 3Snip.465-263a_s_at | Fully Exonic | 11 | ENSG00000146374 | RSPO3 | 84870 | 20866 | Forward | 6 |
| 3Snip.4760-1950a_s_at | Fully Exonic | 11 | ENSG00000197614 | MFAP5 | 8076 | 29673 | Reverse | 12 |
| 3Snip.546-712a_s_at | Fully Exonic | 11 | ENSG00000104313 | EYA1 | 2138 | 3519 | Reverse | 8 |
| 3Snip.5724-41a_s_at | Fully Exonic | 10 | ENSG00000164825 | DEFB1 | 1672 | 2766 | Reverse | 8 |
| 3Snip.6683-12a_x_at | Fully Exonic | 11 | ENSG00000225937 | PCA3 | 50652 | 8637 | Forward | 9 |
| 3Snip.7067-10a_s_at | Fully Exonic | 11 | ENSG00000106366 | SERPINE1 | 5054 | 8583 | Forward | 7 |
| 3Snip.7068-570a_s_at | Fully Exonic | 11 | ENSG00000106366 | SERPINE1 | 5054 | 8583 | Forward | 7 |
| 3Snip.7769-1124a_at | Fully Exonic | 11 | ENSG00000077274 | CAPN6 | 827 | 1483 | Reverse | X |
| 3Snip.972-5a_s_at | Fully Exonic | 11 | ENSG00000124233 | SEMG1 | 6406 | 10742 | Forward | 20 |
| PC3P.10239.C1_s_at | Fully Exonic | 11 | ENSG00000186081 | KRT5 | 3852 | 6442 | Reverse | 12 |
| PC3P.1038.C2_s_at | Fully Exonic | 11 | ENSG00000142515 | KLK3 | 354 | 6364 | Forward | 19 |
| PC3P.104.CB1_s_at | Fully Exonic | 11 | ENSG00000196136 | SERPINA3 | 12 | 16 | Forward | 14 |
| PC3P.104.CB1_s_at | Fully Exonic | 11 | ENSG00000273259 | N/A | 12 | NOVEL pc | Forward | 14 |
| PC3P.11025.C1_s_at | Fully Exonic | 9 | ENSG00000197635 | DPP4 | 1803 | 3009 | Reverse | 2 |
| PC3P.11294.C1_s_at | Fully Exonic | 11 | ENSG00000225937 | PCA3 | 50652 | 8637 | Forward | 9 |
| PC3P.11557.C1_s_at | Fully Exonic | 11 | ENSG00000183036 | PCP4 | 5121 | 8742 | Forward | 21 |
| PC3P.12013.C1_s_at | Fully Exonic | 11 | ENSG00000144481 | TRPM8 | 79054 | 17961 | Forward | 2 |
| PC3P.12104.C1_at | Fully Exonic | 11 | ENSG00000130147 | SH3BP4 | 23677 | 10826 | Forward | 2 |
| PC3P.122.CB1_x_at | Fully Exonic | 7 | ENSG00000160862 | AZGP1 | 563 | 910 | Reverse | 7 |
| PC3P.122.CB2_at | Fully Exonic | 10 | ENSG00000160862 | AZGP1 | 563 | 910 | Reverse | 7 |
| PC3P.12363.C1_s_at | Fully Exonic | 11 | ENSG00000113296 | THBS4 | 7060 | 11788 | Forward | 5 |
| PC3P.12591.C1_x_at | Includes Intronic | 11 | ENSG00000144481 | TRPM8 | 79054 | 17961 | Forward | 2 |
| PC3P.1261.C1_s_at | Fully Exonic | 11 | ENSG00000144481 | TRPM8 | 79054 | 17961 | Forward | 2 |
| PC3P.12706.C1_s_at | Fully Exonic | 11 | ENSG00000166819 | PLIN1 | 5346 | 9076 | Reverse | 15 |
| PC3P.12756.C1_x_at | Includes Intronic | 9 | ENSG00000255240 | N/A | 283194 | NOVEL as | Reverse | 11 |
| PC3P.12787.C1_x_at | Fully Exonic | 11 | ENSG00000185022 | MAFF | 23764 | 6780 | Forward | 22 |
| PC3P.12920.C1_x_at | Fully Exonic | 11 | ENSG00000250423 | KIAA1210 | 57481 | 29218 | Reverse | X |
| PC3P.13143.C1_at | Includes Intronic | 9 | ENSG00000225937 | PCA3 | 50652 | 8637 | Forward | 9 |
| PC3P.13143.C1_x_at | Includes Intronic | 10 | ENSG00000225937 | PCA3 | 50652 | 8637 | Forward | 9 |
| PC3P.1358.C1_at | Fully Exonic | 11 | ENSG00000146205 | ANO7 | 50636 | 31677 | Forward | 2 |
| PC3P.1358.C1-1172a_s_at | Fully Exonic | 11 | ENSG00000146205 | ANO7 | 50636 | 31677 | Forward | 2 |
| PC3P.13654.C1_at | Includes Intronic | 10 | ENSG00000196091 | MYBPC1 | 4604 | 7549 | Forward | 12 |
| PC3P.13654.C1_x_at | Includes Intronic | 9 | ENSG00000196091 | MYBPC1 | 4604 | 7549 | Forward | 12 |
| PC3P.14133.C1_at | Fully Exonic | 11 | ENSG00000130147 | SH3BP4 | 23677 | 10826 | Forward | 2 |
| PC3P.14133.C1_x_at | Fully Exonic | 10 | ENSG00000130147 | SH3BP4 | 23677 | 10826 | Forward | 2 |
| PC3P.14465.C1_s_at | Fully Exonic | 10 | ENSG00000156469 | MTERFD1 | 51001 | 24258 | Reverse | 8 |
| PC3P.14629.C1_s_at | Fully Exonic | 8 | ENSG00000140263 | SORD | 6652 | 11184 | Forward | 15 |
| PC3P.1507.C1_at | Fully Exonic | 11 | ENSG00000144481 | TRPM8 | 79054 | 17961 | Forward | 2 |
| PC3P.1507.C1_x_at | Fully Exonic | 11 | ENSG00000144481 | TRPM8 | 79054 | 17961 | Forward | 2 |
| PC3P.15181.C1_at | Fully Exonic | 11 | ENSG00000165966 | PDZRN4 | 29951 | 30552 | Forward | 12 |
| PC3P.15181.C1_s_at | Fully Exonic | 11 | ENSG00000165966 | PDZRN4 | 29951 | 30552 | Forward | 12 |
| PC3P.15181.C1_x_at | Fully Exonic | 11 | ENSG00000165966 | PDZRN4 | 29951 | 30552 | Forward | 12 |
| PC3P.15628.C1_s_at | Fully Exonic | 11 | ENSG00000184956 | MUC6 | 4588 | 7517 | Reverse | 11 |
| PC3P.1626.C1_s_at | Fully Exonic | 11 | ENSG00000138166 | DUSP5 | 1847 | 3071 | Forward | 10 |
| PC3P.16300.C1_at | Includes Intronic | 10 | ENSG00000004799 | PDK4 | 5166 | 8812 | Reverse | 7 |
| PC3P.16300.C1_x_at | Includes Intronic | 10 | ENSG00000004799 | PDK4 | 5166 | 8812 | Reverse | 7 |
| PC3P.1643.C1_s_at | Fully Exonic | 11 | ENSG00000230937 | MIR205HG | 406988 | 43562 | Forward | 1 |
| PC3P.1643.C4-370a_s_at | Fully Exonic | 11 | ENSG00000230937 | MIR205HG | 406988 | 43562 | Forward | 1 |
| PC3P.1643.C6-335a_s_at | Fully Exonic | 9 | ENSG00000230937 | MIR205HG | 406988 | 43562 | Forward | 1 |
| PC3P.16431.C1_at | Fully Exonic | 9 | ENSG00000196136 | SERPINA3 | 12 | 16 | Forward | 14 |
| PC3P.16541.C1_at | Includes Intronic | 11 | ENSG00000165966 | PDZRN4 | 29951 | 30552 | Forward | 12 |
| PC3P.16583.C1_at | Fully Exonic | 11 | ENSG00000147655 | RSPO2 | 340419 | 28583 | Reverse | 8 |
| PC3P.16583.C1_x_at | Fully Exonic | 11 | ENSG00000147655 | RSPO2 | 340419 | 28583 | Reverse | 8 |
| PC3P.167.C1_s_at | Fully Exonic | 11 | ENSG00000012223 | LTF | 4057 | 6720 | Reverse | 3 |
| PC3P.16730.C1_x_at | Fully Exonic | 8 | ENSG00000164611 | PTTG1 | 9232 | 9690 | Forward | 5 |
| PC3P.16894.C1_x_at | Fully Exonic | 11 | ENSG00000004799 | PDK4 | 5166 | 8812 | Reverse | 7 |
| PC3P.17142.C1_s_at | Fully Exonic | 11 | ENSG00000123560 | PLP1 | 5354 | 9086 | Forward | X |
| PC3P.1906.C1_s_at | Fully Exonic | 11 | ENSG00000125740 | FOSB | 2354 | 3797 | Forward | 19 |
| PC3P.1906.C1-568a_s_at | Fully Exonic | 11 | ENSG00000125740 | FOSB | 2354 | 3797 | Forward | 19 |
| PC3P.2274.C1_s_at | Fully Exonic | 11 | ENSG00000225937 | PCA3 | 50652 | 8637 | Forward | 9 |
| PC3P.2452.C1_s_at | Fully Exonic | 11 | ENSG00000127954 | STEAP4 | 79689 | 21923 | Reverse | 7 |
| PC3P.2452.C1-520a_s_at | Fully Exonic | 11 | ENSG00000127954 | STEAP4 | 79689 | 21923 | Reverse | 7 |
| PC3P.2736.C1_at | Fully Exonic | 9 | ENSG00000152154 | TMEM178A | 130733 | 28517 | Forward | 2 |
| PC3P.2763.C1_s_at | Fully Exonic | 11 | ENSG00000137673 | MMP7 | 4316 | 7174 | Reverse | 11 |
| PC3P.2825.C1_at | Fully Exonic | 10 | ENSG00000163347 | CLDN1 | 9076 | 2032 | Reverse | 3 |
| PC3P.2825.C1_x_at | Fully Exonic | 10 | ENSG00000163347 | CLDN1 | 9076 | 2032 | Reverse | 3 |
| PC3P.3003.C1_s_at | Fully Exonic | 11 | ENSG00000196091 | MYBPC1 | 4604 | 7549 | Forward | 12 |
| PC3P.3003.C1_x_at | Includes Intronic | 11 | ENSG00000196091 | MYBPC1 | 4604 | 7549 | Forward | 12 |
| PC3P.3163.C1_s_at | Fully Exonic | 11 | ENSG00000196417 | ZNF765 | 91661 | 25092 | Forward | 19 |
| PC3P.3552.C1_s_at | Includes Intronic | 11 | ENSG00000125257 | ABCC4 | 10257 | 55 | Reverse | 13 |
| PC3P.3670.C1_s_at | Fully Exonic | 11 | ENSG00000144481 | TRPM8 | 79054 | 17961 | Forward | 2 |
| PC3P.3670.C1-625a_s_at | Fully Exonic | 11 | ENSG00000144481 | TRPM8 | 79054 | 17961 | Forward | 2 |
| PC3P.3670.C2_s_at | Fully Exonic | 11 | ENSG00000144481 | TRPM8 | 79054 | 17961 | Forward | 2 |
| PC3P.3933.C1_s_at | Fully Exonic | 11 | ENSG00000106366 | SERPINE1 | 5054 | 8583 | Forward | 7 |
| PC3P.4095.C1_at | Fully Exonic | 11 | ENSG00000104313 | EYA1 | 2138 | 3519 | Reverse | 8 |
| PC3P.4095.C1_x_at | Fully Exonic | 11 | ENSG00000104313 | EYA1 | 2138 | 3519 | Reverse | 8 |
| PC3P.4347.C1_s_at | Fully Exonic | 11 | ENSG00000137411 | VARS2 | 57176 | 21642 | Forward | 6 |
| PC3P.4471.C1_s_at | Fully Exonic | 11 | ENSG00000125257 | ABCC4 | 10257 | 55 | Reverse | 13 |
| PC3P.4471.C1-536a_s_at | Fully Exonic | 11 | ENSG00000125257 | ABCC4 | 10257 | 55 | Reverse | 13 |
| PC3P.4974.C1_s_at | Fully Exonic | 11 | ENSG00000197635 | DPP4 | 1803 | 3009 | Reverse | 2 |
| PC3P.5053.C1_s_at | Fully Exonic | 11 | ENSG00000225937 | PCA3 | 50652 | 8637 | Forward | 9 |
| PC3P.5053.C1-490a_s_at | Fully Exonic | 11 | ENSG00000225937 | PCA3 | 50652 | 8637 | Forward | 9 |
| PC3P.525.CB1_s_at | Fully Exonic | 11 | ENSG00000140263 | SORD | 6652 | 11184 | Forward | 15 |
| PC3P.525.CB1-789a_s_at | Fully Exonic | 11 | ENSG00000140263 | SORD | 6652 | 11184 | Forward | 15 |
| PC3P.5711.C1_at | Includes Intronic | 11 | ENSG00000125257 | ABCC4 | 10257 | 55 | Reverse | 13 |
| PC3P.5711.C1_s_at | Fully Exonic | 10 | ENSG00000125257 | ABCC4 | 10257 | 55 | Reverse | 13 |
| PC3P.5711.C2_at | Fully Exonic | 11 | ENSG00000125257 | ABCC4 | 10257 | 55 | Reverse | 13 |
| PC3P.5711.C2_x_at | Fully Exonic | 11 | ENSG00000125257 | ABCC4 | 10257 | 55 | Reverse | 13 |
| PC3P.5784.C1_at | Includes Intronic | 8 | ENSG00000255240 | N/A | 283194 | NOVEL as | Reverse | 11 |
| PC3P.5784.C1_x_at | Includes Intronic | 10 | ENSG00000255240 | N/A | 283194 | NOVEL as | Reverse | 11 |
| PC3P.6847.C1_s_at | Fully Exonic | 11 | ENSG00000081277 | PKP1 | 5317 | 9023 | Forward | 1 |
| PC3P.7245.C1_at | Fully Exonic | 11 | ENSG00000137558 | PI15 | 51050 | 8946 | Forward | 8 |
| PC3P.7245.C1_x_at | Fully Exonic | 11 | ENSG00000137558 | PI15 | 51050 | 8946 | Forward | 8 |
| PC3P.7685.C1_at | Fully Exonic | 11 | ENSG00000196091 | MYBPC1 | 4604 | 7549 | Forward | 12 |
| PC3P.7685.C1_x_at | Fully Exonic | 11 | ENSG00000196091 | MYBPC1 | 4604 | 7549 | Forward | 12 |
| PC3P.7685.C1-693a_s_at | Fully Exonic | 11 | ENSG00000196091 | MYBPC1 | 4604 | 7549 | Forward | 12 |
| PC3P.777.C1_at | Includes Intronic | 11 | ENSG00000125257 | ABCC4 | 10257 | 55 | Reverse | 13 |
| PC3P.777.C1_x_at | Includes Intronic | 11 | ENSG00000125257 | ABCC4 | 10257 | 55 | Reverse | 13 |
| PC3P.8122.C1_s_at | Fully Exonic | 11 | ENSG00000183844 | FAM3B | 54097 | 1253 | Forward | 21 |
| PC3P.8122.C2_s_at | Fully Exonic | 11 | ENSG00000183844 | FAM3B | 54097 | 1253 | Forward | 21 |
| PC3P.8159.C1_s_at | Fully Exonic | 11 | ENSG00000004799 | PDK4 | 5166 | 8812 | Reverse | 7 |
| PC3P.8159.C1-773a_s_at | Fully Exonic | 11 | ENSG00000004799 | PDK4 | 5166 | 8812 | Reverse | 7 |
| PC3P.8311.C1_x_at | Fully Exonic | 6 | ENSG00000137558 | PI15 | 51050 | 8946 | Forward | 8 |
| PC3P.8311.C1-482a_s_at | Fully Exonic | 11 | ENSG00000137558 | PI15 | 51050 | 8946 | Forward | 8 |
| PC3P.8725.C1_at | Includes Intronic | 9 | ENSG00000255240 | N/A | 283194 | NOVEL as | Reverse | 11 |
| PC3P.8725.C1_x_at | Includes Intronic | 7 | ENSG00000255240 | N/A | 283194 | NOVEL as | Reverse | 11 |
| PC3P.8968.C1_s_at | Includes Intronic | 11 | ENSG00000255240 | N/A | 283194 | NOVEL as | Reverse | 11 |
| PC3P.9147.C1_s_at | Fully Exonic | 11 | ENSG00000106366 | SERPINE1 | 5054 | 8583 | Forward | 7 |
| PC3P.9317.C1_s_at | Fully Exonic | 11 | ENSG00000104332 | SFRP1 | 6422 | 10776 | Reverse | 8 |
| PC3P.9417.C1_s_at | Fully Exonic | 11 | ENSG00000140263 | SORD | 6652 | 11184 | Forward | 15 |
| PC3P.9581.C1_x_at | Fully Exonic | 9 | ENSG00000012223 | LTF | 4057 | 6720 | Reverse | 3 |
| PC3P.9828.C1_s_at | Fully Exonic | 11 | ENSG00000125257 | ABCC4 | 10257 | 55 | Reverse | 13 |
| PC3P.9903.C1_at | Fully Exonic | 11 | ENSG00000255240 | N/A | 283194 | NOVEL as | Reverse | 11 |
| PC3P.9903.C1_x_at | Fully Exonic | 11 | ENSG00000255240 | N/A | 283194 | NOVEL as | Reverse | 11 |
| PC3SNG.1055-28a_x_at | Fully Exonic | 11 | ENSG00000160862 | AZGP1 | 563 | 910 | Reverse | 7 |
| PC3SNG.1467-30a_s_at | Fully Exonic | 11 | ENSG00000012223 | LTF | 4057 | 6720 | Reverse | 3 |
| PC3SNG.1549-27a_s_at | Fully Exonic | 11 | ENSG00000148677 | ANKRD1 | 27063 | 15819 | Reverse | 10 |
| PC3SNG.1742-20a_s_at | Fully Exonic | 11 | ENSG00000146205 | ANO7 | 50636 | 31677 | Forward | 2 |
| PC3SNG.1958-2386a_s_at | Fully Exonic | 11 | ENSG00000104332 | SFRP1 | 6422 | 10776 | Reverse | 8 |
| PC3SNG.3669-40a_s_at | Fully Exonic | 11 | ENSG00000196136 | SERPINA3 | 12 | 16 | Forward | 14 |
| PC3SNG.3669-40a_s_at | Fully Exonic | 11 | ENSG00000273259 | N/A | 12 | NOVEL pc | Forward | 14 |
| PC3SNG.3670-154a_s_at | Fully Exonic | 11 | ENSG00000127954 | STEAP4 | 79689 | 21923 | Reverse | 7 |
| PC3SNG.4407-18a_s_at | Fully Exonic | 11 | ENSG00000197614 | MFAP5 | 8076 | 29673 | Reverse | 12 |
| PC3SNG.5215-18a_s_at | Fully Exonic | 11 | ENSG00000088827 | SIGLEC1 | 6614 | 11127 | Reverse | 20 |
| PC3SNG.6387-29a_x_at | Includes Intronic | 11 | ENSG00000255240 | N/A | 283194 | NOVEL as | Reverse | 11 |
| PC3SNG.6626-95a_s_at | Fully Exonic | 11 | ENSG00000215458 | N/A | 284837 | NOVEL as | Reverse | 21 |
| PC3SNG.704-22a_s_at | Fully Exonic | 11 | ENSG00000125257 | ABCC4 | 10257 | 55 | Reverse | 13 |
| PC3SNGnh.1032_x_at | Fully Exonic | 6 | ENSG00000130147 | SH3BP4 | 23677 | 10826 | Forward | 2 |
| PC3SNGnh.141_x_at | Includes Intronic | 11 | ENSG00000125257 | ABCC4 | 10257 | 55 | Reverse | 13 |
| PC3SNGnh.1467_at | Includes Intronic | 11 | ENSG00000144481 | TRPM8 | 79054 | 17961 | Forward | 2 |
| PC3SNGnh.1467_x_at | Includes Intronic | 10 | ENSG00000144481 | TRPM8 | 79054 | 17961 | Forward | 2 |
| PC3SNGnh.1473_at | Includes Intronic | 7 | ENSG00000125257 | ABCC4 | 10257 | 55 | Reverse | 13 |
| PC3SNGnh.1473_x_at | Includes Intronic | 6 | ENSG00000125257 | ABCC4 | 10257 | 55 | Reverse | 13 |
| PC3SNGnh.148_x_at | Includes Intronic | 9 | ENSG00000255240 | N/A | 283194 | NOVEL as | Reverse | 11 |
| PC3SNGnh.1675_x_at | Fully Exonic | 11 | ENSG00000130147 | SH3BP4 | 23677 | 10826 | Forward | 2 |
| PC3SNGnh.2659_at | Includes Intronic | 8 | ENSG00000144481 | TRPM8 | 79054 | 17961 | Forward | 2 |
| PC3SNGnh.274_x_at | Includes Intronic | 11 | ENSG00000196091 | MYBPC1 | 4604 | 7549 | Forward | 12 |
| PC3SNGnh.3350_at | Includes Intronic | 11 | ENSG00000144481 | TRPM8 | 79054 | 17961 | Forward | 2 |
| PC3SNGnh.3350_x_at | Includes Intronic | 11 | ENSG00000144481 | TRPM8 | 79054 | 17961 | Forward | 2 |
| PC3SNGnh.3389_at | Includes Intronic | 11 | ENSG00000198062 | POTEH | 23784 | 133 | Reverse | 22 |
| PC3SNGnh.3389_x_at | Includes Intronic | 11 | ENSG00000198062 | POTEH | 23784 | 133 | Reverse | 22 |
| PC3SNGnh.3957_at | Includes Intronic | 11 | ENSG00000255240 | N/A | 283194 | NOVEL as | Reverse | 11 |
| PC3SNGnh.4158_at | Fully Exonic | 10 | ENSG00000207559 | MIR578 | 693163 | 32834 | Forward | 4 |
| PC3SNGnh.4553_s_at | Includes Intronic | 11 | ENSG00000104313 | EYA1 | 2138 | 3519 | Reverse | 8 |
| PC3SNGnh.4912_at | Includes Intronic | 11 | ENSG00000004799 | PDK4 | 5166 | 8812 | Reverse | 7 |
| PC3SNGnh.4912_x_at | Includes Intronic | 11 | ENSG00000004799 | PDK4 | 5166 | 8812 | Reverse | 7 |
| PC3SNGnh.4946_at | Includes Intronic | 9 | ENSG00000130147 | SH3BP4 | 23677 | 10826 | Forward | 2 |
| PC3SNGnh.4946_x_at | Includes Intronic | 10 | ENSG00000130147 | SH3BP4 | 23677 | 10826 | Forward | 2 |
| PC3SNGnh.5297_x_at | Fully Exonic | 6 | ENSG00000130147 | SH3BP4 | 23677 | 10826 | Forward | 2 |
| PC3SNGnh.5369_at | Includes Intronic | 11 | ENSG00000004799 | PDK4 | 5166 | 8812 | Reverse | 7 |
| PC3SNGnh.5369_x_at | Includes Intronic | 8 | ENSG00000004799 | PDK4 | 5166 | 8812 | Reverse | 7 |
| PC3SNGnh.5454_at | Includes Intronic | 11 | ENSG00000144481 | TRPM8 | 79054 | 17961 | Forward | 2 |
| PC3SNGnh.6624_x_at | Includes Intronic | 10 | ENSG00000125257 | ABCC4 | 10257 | 55 | Reverse | 13 |
| PC3SNGnh.6679_s_at | Includes Intronic | 11 | ENSG00000125257 | ABCC4 | 10257 | 55 | Reverse | 13 |
| PC3SNGnh.7327_x_at | Includes Intronic | 11 | ENSG00000163347 | CLDN1 | 9076 | 2032 | Reverse | 3 |
| PC3SNGnh.932_x_at | Includes Intronic | 11 | ENSG00000225937 | PCA3 | 50652 | 8637 | Forward | 9 |
| PCADA.10459_at | Fully Exonic | 11 | ENSG00000165349 | SLC7A3 | 84889 | 11061 | Reverse | X |
| PCADA.12072_at | Fully Exonic | 10 | ENSG00000163347 | CLDN1 | 9076 | 2032 | Reverse | 3 |
| PCADA.12209_at | Fully Exonic | 11 | ENSG00000153976 | HS3ST3A1 | 9955 | 5196 | Reverse | 17 |
| PCADA.12209_x_at | Fully Exonic | 11 | ENSG00000153976 | HS3ST3A1 | 9955 | 5196 | Reverse | 17 |
| PCADA.12738_s_at | Fully Exonic | 11 | ENSG00000123560 | PLP1 | 5354 | 9086 | Forward | X |
| PCADA.13348_at | Fully Exonic | 11 | ENSG00000185022 | MAFF | 23764 | 6780 | Forward | 22 |
| PCADA.13348_x_at | Fully Exonic | 11 | ENSG00000185022 | MAFF | 23764 | 6780 | Forward | 22 |
| PCADA.445_s_at | Fully Exonic | 11 | ENSG00000125257 | ABCC4 | 10257 | 55 | Reverse | 13 |
| PCADA.7259_at | Includes Intronic | 11 | ENSG00000163347 | CLDN1 | 9076 | 2032 | Reverse | 3 |
| PCADA.7259_x_at | Includes Intronic | 11 | ENSG00000163347 | CLDN1 | 9076 | 2032 | Reverse | 3 |
| PCADA.8842_at | Fully Exonic | 11 | ENSG00000182916 | TCEAL7 | 56849 | 28336 | Forward | X |
| PCADA.8842_x_at | Fully Exonic | 11 | ENSG00000182916 | TCEAL7 | 56849 | 28336 | Forward | X |
| PCADA.8850_s_at | Fully Exonic | 11 | ENSG00000184160 | ADRA2C | 152 | 283 | Forward | 4 |
| PCADA.9364_s_at | Fully Exonic | 11 | ENSG00000249992 | TMEM158 | 25907 | 30293 | Reverse | 3 |
| PCADNP.1146_s_at | Fully Exonic | 9 | ENSG00000125257 | ABCC4 | 10257 | 55 | Reverse | 13 |
| PCADNP.12255_at | Includes Intronic | 11 | ENSG00000125257 | ABCC4 | 10257 | 55 | Reverse | 13 |
| PCADNP.16534_at | Fully Exonic | 11 | ENSG00000138160 | KIF11 | 3832 | 6388 | Forward | 10 |
| PCADNP.16534_x_at | Fully Exonic | 11 | ENSG00000138160 | KIF11 | 3832 | 6388 | Forward | 10 |
| PCADNP.17332_s_at | Fully Exonic | 11 | ENSG00000137558 | PI15 | 51050 | 8946 | Forward | 8 |
| PCADNP.18829_x_at | Fully Exonic | 11 | ENSG00000142515 | KLK3 | 354 | 6364 | Forward | 19 |
| PCADNP.18913_s_at | Fully Exonic | 11 | ENSG00000004799 | PDK4 | 5166 | 8812 | Reverse | 7 |
| PCADNP.3640_at | Fully Exonic | 11 | ENSG00000255240 | N/A | 283194 | NOVEL as | Reverse | 11 |
| PCADNP.3640_x_at | Fully Exonic | 11 | ENSG00000255240 | N/A | 283194 | NOVEL as | Reverse | 11 |
| PCADNP.4300_x_at | Includes Intronic | 11 | ENSG00000106366 | SERPINE1 | 5054 | 8583 | Forward | 7 |
| PCADNP.5263_s_at | Fully Exonic | 11 | ENSG00000183844 | FAM3B | 54097 | 1253 | Forward | 21 |
| PCADNP.6193_s_at | Fully Exonic | 11 | ENSG00000130147 | SH3BP4 | 23677 | 10826 | Forward | 2 |
| PCADNP.9049_s_at | Fully Exonic | 11 | ENSG00000181195 | PENK | 5179 | 8831 | Reverse | 8 |
| PCADNP.9181_at | Includes Intronic | 10 | ENSG00000197635 | DPP4 | 1803 | 3009 | Reverse | 2 |
| PCEM.1525_s_at | Fully Exonic | 11 | ENSG00000125740 | FOSB | 2354 | 3797 | Forward | 19 |
| PCEM.2151_at | Includes Intronic | 11 | ENSG00000197635 | DPP4 | 1803 | 3009 | Reverse | 2 |
| PCEM.2221_at | Fully Exonic | 11 | ENSG00000004799 | PDK4 | 5166 | 8812 | Reverse | 7 |
| PCEM.799_x_at | Fully Exonic | 6 | ENSG00000142515 | KLK3 | 354 | 6364 | Forward | 19 |
| PCHP.1147_s_at | Fully Exonic | 11 | ENSG00000128016 | ZFP36 | 7538 | 12862 | Forward | 19 |
| PCHP.1153_s_at | Fully Exonic | 11 | ENSG00000167900 | TK1 | 7083 | 11830 | Reverse | 17 |
| PCHP.120_s_at | Fully Exonic | 11 | ENSG00000147394 | ZNF185 | 7739 | 12976 | Forward | X |
| PCHP.1458_s_at | Fully Exonic | 11 | ENSG00000007908 | SELE | 6401 | 10718 | Reverse | 1 |
| PCHP.1474_s_at | Fully Exonic | 11 | ENSG00000106366 | SERPINE1 | 5054 | 8583 | Forward | 7 |
| PCHP.233_x_at | Fully Exonic | 7 | ENSG00000164611 | PTTG1 | 9232 | 9690 | Forward | 5 |
| PCHP.235_s_at | Fully Exonic | 11 | ENSG00000197635 | DPP4 | 1803 | 3009 | Reverse | 2 |
| PCHP.412_x_at | Fully Exonic | 11 | ENSG00000081041 | CXCL2 | 2920 | 4603 | Reverse | 4 |
| PCHP.43_s_at | Fully Exonic | 11 | ENSG00000123975 | CKS2 | 1164 | 2000 | Forward | 9 |
| PCHP.560_s_at | Fully Exonic | 10 | ENSG00000146205 | ANO7 | 50636 | 31677 | Forward | 2 |
| PCHP.564_s_at | Fully Exonic | 11 | ENSG00000146205 | ANO7 | 50636 | 31677 | Forward | 2 |
| PCHP.604_x_at | Fully Exonic | 11 | ENSG00000142515 | KLK3 | 354 | 6364 | Forward | 19 |
| PCHP.651_s_at | Fully Exonic | 11 | ENSG00000101951 | PAGE4 | 9506 | 4108 | Forward | X |
| PCHP.785_s_at | Fully Exonic | 11 | ENSG00000142515 | KLK3 | 354 | 6364 | Forward | 19 |
| PCPD.14169.C1_at | Includes Intronic | 11 | ENSG00000255240 | N/A | 283194 | NOVEL as | Reverse | 11 |
| PCPD.14169.C1_x_at | Includes Intronic | 11 | ENSG00000255240 | N/A | 283194 | NOVEL as | Reverse | 11 |
| PCPD.1539.C1_s_at | Fully Exonic | 11 | ENSG00000266559 | MIR4530 | 100616163 | 41764 | Reverse | 19 |
| PCPD.20005.C1_at | Includes Intronic | 11 | ENSG00000255240 | N/A | 283194 | NOVEL as | Reverse | 11 |
| PCPD.20005.C1_x_at | Includes Intronic | 9 | ENSG00000255240 | N/A | 283194 | NOVEL as | Reverse | 11 |
| PCPD.2281.C1_at | Includes Intronic | 6 | ENSG00000138166 | DUSP5 | 1847 | 3071 | Forward | 10 |
| PCPD.29484.C1_at | Fully Exonic | 11 | ENSG00000004799 | PDK4 | 5166 | 8812 | Reverse | 7 |
| PCPD.3244.C1_s_at | Fully Exonic | 11 | ENSG00000125740 | FOSB | 2354 | 3797 | Forward | 19 |
| PCPD.3722.C1_s_at | Fully Exonic | 10 | ENSG00000104313 | EYA1 | 2138 | 3519 | Reverse | 8 |
| PCPD.39829.C1_s_at | Fully Exonic | 11 | ENSG00000225986 | UBXN10-AS1 | 101928017 | 41141 | Reverse | 1 |
| PCPD.5859.C2_at | Includes Intronic | 11 | ENSG00000198062 | POTEH | 23784 | 133 | Reverse | 22 |
| PCPD.5961.C1_at | Includes Intronic | 9 | ENSG00000255240 | N/A | 283194 | NOVEL as | Reverse | 11 |
| PCPD.7116.C1_at | Includes Intronic | 11 | ENSG00000125257 | ABCC4 | 10257 | 55 | Reverse | 13 |
| PCPD.7116.C1_x_at | Includes Intronic | 10 | ENSG00000125257 | ABCC4 | 10257 | 55 | Reverse | 13 |
| PCRS.626_x_at | Fully Exonic | 11 | ENSG00000198062 | POTEH | 23784 | 133 | Reverse | 22 |
| PCRS.812_s_at | Fully Exonic | 11 | ENSG00000196417 | ZNF765 | 91661 | 25092 | Forward | 19 |
| PCRS2.2880_s_at | Fully Exonic | 10 | ENSG00000138166 | DUSP5 | 1847 | 3071 | Forward | 10 |
| PCRS2.3147_x_at | Fully Exonic | 8 | ENSG00000230937 | MIR205HG | 406988 | 43562 | Forward | 1 |
| PCRS2.4412_s_at | Fully Exonic | 11 | ENSG00000146374 | RSPO3 | 84870 | 20866 | Forward | 6 |
| PCRS2.6477_s_at | Fully Exonic | 11 | ENSG00000181195 | PENK | 5179 | 8831 | Reverse | 8 |
| PCRS2.7477_s_at | Fully Exonic | 11 | ENSG00000189292 | FAM150B | 285016 | 27683 | Reverse | 2 |
| PCRS3.3951_at | Fully Exonic | 8 | ENSG00000205362 | MT1A | 4489 | 7393 | Forward | 16 |

NoPA—Number of probes aligned
Csome no—Chromosome number
NOVEL pc—novel protein coding (clone based vega gene)
NOVEL as—novel antisense (clone based vega gene)

[0048] Table 1 lists the sequence identifiers for the full sequences against which gene expression assays may be targeted, more specific target sequences and probes/probesets which hybridize to those target sequences. Suitable primers and/or probes may be designed using known methods to determine gene expression based on the deposited gene sequences, the full sequences and target sequences specified herein. Furthermore, specific nucleic acid amplification assays (e.g. PCR, such as qPCR) have also been designed that permit reliable determination of gene expression levels for the genes in table 1. These assays are summarized in Table 1B. The assay target sequence and primers and primer pairs form separate aspects of the invention. For two of the targets, MIR578 and MIR4530, due to the short length of the target sequences, the approach taken by the inventors was not applicable to generate an amplification assay. For those targets, commercial assays are available and the sequences of the primers are provided below. For MIR578, the Life Technologies 4426961 Origene HP300490 assay may be employed. The forward and reverse primers are as follows:

(SEQ ID NO: 3151)
CTTCTTGTGCTCTAGGAT
(SEQ ID NO: 3152)
GAACATGTCTGCGTATCTC

[0049] For MIR4530, the Life Technologies 4427012 Origene HP301022 assay may be employed. The forward and reverse primers are as follows:

(SEQ ID NO: 3153)
CCCAGCAGGACGGGAGC
(SEQ ID NO: 3154)
GAACATGTCTGCGTATCTC
seems to be same as above

[0050] These specific primers, while useful in performing the methods of the invention, are thus not specifically claimed per se as forming part of the invention.

TABLE 1B
PCR assays designed for each of 70 genes in the signature

| | | | | | | For- | For- | | Re- | Re- |
|---|---|---|---|---|---|---|---|---|---|---|
| Design | | | | | | ward | ward | | verse | verse |
| Template | | | | | | prim- | Prim- | | prim- | Prim- |
| used | | | | Exon | For- | er | er | Re- | er | er |
| (Entrez | | Gene | Assay | span- | ward Prim- | SEQ | ABI | verse Prim- | SEQ | ABI |
| Gene ID) | GeneBank ID | Symbol | ID | ning | er ID | ID NO | TM | er ID | ID NO | TM |
| 827 | NM_014289.3 | CAPN6 | CAPN6_A1 | Yes | CAPN6_F1 | 3015 | 62.30 | CAPN6_R1 | 3083 | 60.78 |
| 7060 | NM_001306212.1 | THBS4 | THBS4_A1 | Yes | THL64_F1 | 3016 | 63.34 | THBS4_R1 | 3084 | 67.66 |
| 5354 | NM_000533.4 | PLP1 | PLP_A1 | Yes | PLP1_F1 | 3017 | 59.72 | PLP1_R1 | 3085 | 63.75 |
| 4489 | NM_005946.2 | MT1A | MT1A_A1 | Yes | MT1A_F1 | 3018 | 65.41 | MT1A_R1 | 3086 | 63.59 |
| 406988 | NR_029622.1 | MIR205HG | MIR205HG_A1 | Yes | MIR205HG_F1 | 3019 | 63.02 | MIR205HG_R1 | 3087 | 61.98 |
| 6406 | NM_003007.3 | SEMG1 | SEMG1_A1 | Yes | SEMG1_F1 | 3020 | 63.49 | SEMG1_R1 | 3088 | 63.59 |
| 84870 | NM_032784.4 | RSPO3 | RSP03_A1 | Yes | RSP03_F1 | 3021 | 61.24 | RSP03_R1 | 3089 | 63.13 |
| 50636 | NM_001001666.3 | ANO7 | ANO7_A1 | Yes | ANO7_F1 | 3022 | 62.34 | ANO7_R1 | 3090 | 60.93 |
| 5121 | NM_006198.2 | PCP4 | PCP4_A1 | Yes | PCP4_F1 | 3023 | 60.53 | PCP4_R1 | 3091 | 61.70 |
| 27063 | NM_014391.2 | ANKRD1 | ANKRD1_A1 | Yes | ANKRD1_F1 | 3024 | 64.90 | ANKRD1_R1 | 3092 | 65.11 |
| 4604 | NM_001254718.1 | MYBPC1 | MYBPC1_A1 | Yes | MYBPC1_F1 | 3025 | 62.31 | MYBPC1_R1 | 3093 | 62.59 |
| 4316 | NM_002423.3 | MMP7 | MMP7_A1 | Yes | MMP7_F1 | 3026 | 53.80 | MMP7_R1 | 3094 | 48.86 |
| 12 | NM_001085.4 | SERPINA3 | SERPINA3_A1 | Yes | SERPINA3_F1 | 3027 | 60.39 | SERPINA3_R1 | 3095 | 62.07 |
| 6401 | NM_000450.2 | SELE | SELE_A1 | Yes | SELE_F1 | 3028 | 63.62 | SELE_R1 | 3096 | 62.56 |
| 3852 | NM_000424.3 | KRT5 | KRT5_A1 | Yes | KRT5_F1 | 3029 | 63.40 | KRT5_R1 | 3097 | 62.30 |
| 4057 | NM_001199149.1 | LTF | LTF_A1 | Yes | LTF_F1 | 3030 | 62.75 | LTF_R1 | 3098 | 64.08 |
| 57481 | NM_020721.1 | KIAA1210 | KIAA1210_A1 | Yes | KIAA1210_F1 | 3031 | 60.98 | KIAA1210_R1 | 3099 | 62.19 |
| 25907 | NM_015444.2 | TMEM158 | TMEM158_A1 | Yes | TMEM158_F1 | 3032 | 58.44 | TMEM158_R1 | 3100 | 62.20 |
| 7538 | NM_003407.3 | ZFP36 | ZFP36_A1 | Yes | ZFP36_F1 | 3033 | 63.26 | ZFP36_R1 | 3101 | 35.37 |
| 2354 | NM_001114171.1 | FOSB | FOSB_A1 | Yes | FOSB_F1 | 3034 | 61.04 | FOSB_R1 | 3102 | 62.16 |
| 50652 | NR_015342.1 | PCA3 | PCA3_A1 | Yes | PCA3_F1 | 3035 | 62.83 | PCS3_R1 | 3103 | 61.36 |
| 79054 | NM_024080.4 | TRPM8 | TRPM8_A1 | Yes | TRPM8_F1 | 3036 | 61.89 | TRPM8_R1 | 3104 | 63.81 |
| 9232 | NM_001282382.1 | PTTG1 | PTTG1_A1 | No | PTTG1_F1 | 3037 | 60.97 | PTTG1_R1 | 3105 | 62.25 |
| 283194 | NR_033853.2 | LOC283194 | LOC283194_A1 | Yes | LOC288194_F1 | 3038 | 62.83 | LOC283194_R1 | 3106 | 61.36 |
| 9506 | NM_007003.3 | PAGE4 | PAGE4_A1 | Yes | PAGE4_F1 | 3039 | 61.09 | PAGE4_R1 | 3107 | 61.89 |
| 79689 | NM_001205315.1 | STEAP4 | STEAP4_A1 | Yes | STEAP4_F1 | 3040 | 64.22 | STEAP4_R1 | 3108 | 59.86 |
| 130733 | NM_001167959.1 | TMEM178A | TMEM178A_A1 | No | TMEM178A_F1 | 3041 | 70.52 | TMEM178A_R1 | 3109 | 59.86 |
| 2920 | NM_002089.3 | CXCL2 | CXCL2_A1 | Yes | CXCL2_F1 | 3042 | 62.60 | CXCL2_R1 | 3110 | 64.83 |
| 9955 | NM_006042.2 | HS3ST3A1 | HS3ST3A1_A1 | Yes | HS3ST3A1_F1 | 3043 | 61.52 | HS3ST3A1_R1 | 3111 | 62.80 |
| 2138 | NM_000503.5 | EYA1 | EYA1_A1 | Yes | EYA1_F1 | 3044 | 32.20 | EYA1_R1 | 3112 | 60.78 |
| 340419 | NM_001282863.1 | RSPO2 | RSPO2_A1 | Yes | RSPO2_F1 | 3045 | 64.91 | RSPO2_R1 | 3113 | 63.38 |
| 5317 | NM_000299.3 | PKP1 | PKP1_A1 | Yes | PKP1_F1 | 3046 | 60.55 | PKP1_R1 | 3114 | 63.39 |
| 4588 | NM_005961.2 | MUC6 | MUC6_A1 | Yes | MUC6_F1 | 3047 | 58.46 | MUC6_R1 | 3115 | 62.58 |
| 5179 | NM_001135690.1 | PENK | PENK_A1 | Yes | PENK_F1 | 3048 | 59 | PENK_R1 | 3116 | 58 |
| 1672 | NM_005218.3 | DEFB1 | DEFB1 | Yes | DEFB1_F1 | 3049 | 62.3 | DEFB1_R1 | 3117 | 62.1 |
| 84889 | NM_001048164.2 | SLC7A3 | SLC7A3_A1 | YES | SLC7A3 | 3050 | 60 | SLC7A3_R1 | 3118 | 59 |
| 693163 | NR_030304.1 | MIR578 | MIR578_A1 | No | MIR578_F1 | N/A | N/A | MIR578_R1 | N/A | N/A |
| 51050 | NM_015886.3 | PI15 | PI15_A1 | Yes | PI15_F1 | 3051 | 61.9 | PI15_R1 | 3119 | 62.1 |
| 101928017 | NR _110078.1 | UBXN10- | UBXB10- | Yes | UBXB10- | 3052 | 61.55 | UBXB10- | 3120 | 61.42 |
| | | AS1 | AS1_A1 | | AS1_F1 | | | AS1_R1 | | |
| 5166 | NM_002612.3 | PDK4 | PDK4_A1 | Yes | PDK4_F1 | 3053 | 62.00 | PDK4_R1 | 3121 | 61.90 |
| 644844 | NM_001145643.1 | PHGR1 | PHGR1_A1 | Yes | PHGR1_F1 | 3054 | 60.00 | PHGR1_R1 | 3122 | 59.00 |
| 5054 | NM_000602.4 | SERPINE1 | SERPINE1_A1 | Yes | SERPINE1_F1 | 3055 | 59.00 | SERPINE1_R1 | 3123 | 59.00 |
| 29951 | NM_001164595.1 | PDZRN4 | PDZRN4_A1 | Yes | PDZRN4_F1 | 3056 | 62 | PDZRN4_R1 | 3124 | 62.6 |
| 7739 | NM_001178106.1 | ZNF185 | ZNF185_A1 | Yes | ZNF185_F1 | 3057 | 63.92 | ZNF185_R1 | 3125 | 65.09 |
| 152 | NM_000683.3 | ADRA2C | ADRA2C_A1 | No | ADRA2C_F1 | 3058 | 61.8 | ADRA2C_R1 | 3126 | 61.4 |
| 563 | NM_001185.3 | AZGP1 | AZGP1_A1 | Yes | AZGP1_F1 | 3059 | 59.00 | AZGP1_R1 | 3127 | 59.00 |
| 7083 | NM_003258.4 | TK1 | TK1_A1 | Yes | TK1_F1 | 3060 | 61.8 | TK1_R1 | 3128 | 61.9 |
| 23784 | NM_001136213.1 | POTEH | POTEH_A1 | Yes | POTEH_F1 | 3061 | 62.4 | POTEH_R1 | 3129 | 62 |
| 3832 | NM_004523.3 | KIF11 | KIF11_A1 | Yes | KIF11_F1 | 3062 | 60.00 | KIF11 _ R1 | 3130 | 60.00 |
| 9076 | NM_021101.4 | CLDN1 | CLDN1_A1 | Yes | CLDN1_F1 | 3063 | 60.00 | CLDN1_R1 | 3131 | 59.00 |
| 100616163 | NR_039755.1 | MIR4530 | MIR4530_A1 | No | MIR4530_F1 | N/A | N/A | MIR4530_R1 | N/A | N/A |
| 23764 | NM_001161572.1 | MAFF | MAFF_A1 | Yes | MAFF_F1 | 3064 | 61.7 | MAFF_R1 | 3132 | 62.3 |
| 91661 | NM_001040185.1 | ZNF765 | ZNF765_A1 | Yes | ZNF765_F1 | 3065 | 62.1 | ZNF765_R1 | 3133 | 61.9 |
| 1164 | NM_001827.2 | CKS2 | CKS2_A1 | Yes | CKS2_F1 | 3066 | 59.00 | CKS2_R1 | 3134 | 59.00 |
| 56849 | NM_152278.3 | TCEAL7 | TCEAL7_A1 | Yes | TCEAL7 _F1 | 3067 | 59.00 | TCEAL7 _R1 | 3135 | 60.00 |
| 5346 | NM_001145311.1 | PLIN1 | PLIN1_A1 | Yes | PLIN1_F1 | 3068 | 62.2 | PLIN1_R1 | 3136 | 62.4 |
| 6614 | NM_023068.3 | SIGLEC1 | SIGLEC1_A1 | Yes | SIGLEC1_F1 | 3069 | 59.00 | SIGLEC1_R1 | 3137 | 60.00 |
| 285016 | NM_001002919.2 | FAM150B | FAM150B_A1 | Yes | FAM150B_F1 | 3070 | 60.00 | FAM150B_R1 | 3138 | 59.00 |
| 8076 | NM_001297709.1 | MFAP5 | MFAP5_A1 | Yes | MFAP5_F1 | 3071 | 61.7 | MFAP5_R1 | 3139 | 62.2 |
| 6422 | NM_003012.4 | SFRP1 | SFRP1_A1 | Yes | SFRP1_F1 | 3072 | 62 | SFRP1_R1 | 3140 | 62.1 |
| 1847 | NM_004419.3 | DUSP5 | DUSP5_A1 | Yes | DUSP5_F1 | 3073 | 61.9 | DUSP5_R1 | 3141 | 61.7 |
| 57176 | NM_001167733.2 | VARS2 | VARS2_A1 | Yes | VARS2_F1 | 3074 | 62.1 | VARS2_R1 | 3142 | 61.8 |
| 10257 | NM_001105515.2 | ABCC4 | ABCC4_A1 | Yes | ABCC4_F1 | 3075 | 60.00 | ABCC4_R1 | 3143 | 60.00 |
| 23677 | NM_014521.2 | SH3BP4 | SH3BP4_A1 | Yes | SH3BP4_F1 | 3076 | 58.00 | SH3BP4_R1 | 3144 | 60.00 |
| 6652 | NM_003104.5 | SORD | SORD_A1 | Yes | SORD_F1 | 3077 | 60.00 | SORD_R1 | 3145 | 59.00 |
| 51001 | NM_001286643.1 | MTERFD1 | MTERFD1_A1 | Yes | MTERFD_F1 | 3078 | 59.00 | MTERFD1_R1 | 3146 | 60.00 |
| 1803 | XM_005246371.2 | DPP4 | DPP4_A1 | Yes | DPP4_F1 | 3079 | 60.00 | DPP4_R1 | 3147 | 59.00 |
| 284837 | NR_026961.1 | AATBC | AATBC_A1 | Yes | AATBC_F1 | 3080 | 61.99 | AATBC_R1 | 3148 | 62.42 |
| 54097 | NM_058186.3 | FAM3B | FAM3B_A1 | Yes | FAM3B_F1 | 3081 | 61.8 | FAM3B_R1 | 3149 | 62.2 |
| 354 | NM_001030047.1 | KLK3 | KLK3_A1 | Yes | KLK_F1 | 3082 | 59.00 | KLK3_R1 | 3150 | 59.00 |

[0051] It should be noted that the complement of each sequence described herein may be employed as appropriate (e.g. for designing hybridizing probes and/or primers, including primer pairs).

[0052] In certain embodiments the expression level of at least 2, 3, 4, 5, 6, 7, 8, 9, 10, 11, 12, 13, 14, 15, 16, 17, 18, 19, 20, 21, 22, 23, 24, 25, 26, 27, 28, 29, 30, 31, 32, 33, 34, 35, 36, 37, 38, 39, 40, 41, 42, 43, 44, 45, 46, 47, 48, 49, 50, 51, 52, 53, 54, 55, 56, 57, 58, 59, 60, 61, 62, 63, 64, 65, 66, 67, 68, 69 or 70 of the genes in table 1 is determined. Some analysis reported herein indicates that applying a signature comprising the measured expression levels of 7 or 12 genes can provide acceptable performance. Thus, in some embodiments, the minimum number of genes in the gene signature is 12. They can be any 7 or 12 genes from the 70 genes.

[0053] For the avoidance of doubt, additional genes (outside of the 70 genes) can be included in the signatures as would be readily appreciated by one skilled in the art. As is shown in FIGS. 2 to 4, larger gene signatures are also potentially suitable.

[0054] In some embodiments, a signature score is derived from the measured expression levels of the 2, 3, 4, 5, 6, 7, 8, 9, 10, 11, 12, 13, 14, 15, 16, 17, 18, 19, 20, 21, 22, 23, 24, 25, 26, 27, 28, 29, 30, 31, 32, 33, 34, 35, 36, 37, 38, 39, 40, 41, 42, 43, 44, 45, 46, 47, 48, 49, 50, 51, 52, 53, 54, 55, 56, 57, 58, 59, 60, 61, 62, 63, 64, 65, 66, 67, 68, 69 or 70 genes in table 1. Generation of such signature scores is described herein. The signature score may rely upon the weightings attributed to each gene as listed in Table 1, for the 70 gene signature. The weightings would, of course, need to be recalculated where a signature of different composition was utilized, for example including fewer than the total 70 gene signature. Similar considerations apply to the bias and constant offset values, as discussed below.

[0055] Gene signatures may be formulated in rank order in some embodiments, for example a 10 gene signature could be formed from the first 10 ranked genes listed in Table 1. However, the rankings are based on performance in the context of the 70 gene signature. Accordingly, formulation of sub-signatures of the 70 gene signature are not restricted to the same hierarchy and may be formulated using any combination of the 70 genes to form the suitably sized signature.

[0056] Core gene analysis was performed to determine a ranking for the genes based upon their impact on performance when removed from the signature. This analysis involved 10,000 random samplings of 10 signature genes from the original 70 signature gene set. For each iteration, 10 randomly selected signature genes were removed and the performance of the remaining 65 genes was evaluated using the endpoint to determine the impact on HR (Hazard Ratio) performance when these 10 genes were removed.

[0057] When this was performed using the FASTMAN Biopsy Validation Cohort of 248 samples, evaluation utilised the biochemical recurrence (BCR) endpoint.

[0058] The signature genes were weighted based upon the change in HR performance (Delta HR) based upon their inclusion or exclusion. The gene ranked ‘1’ has the most negative impact on performance when removed and the gene ranked ‘70’ has the least impact on performance when removed. The results are shown in Table 35 below.

[0059] Thus, in some embodiments, gene signatures are formulated in rank order. For example a 10 gene signature could comprise the first 10 ranked genes listed in Table 35. Accordingly, in some embodiments, the expression level of at least 1, 2, 3, 4, 5, 6, 7, 8, 9 or 10 of the 10 highest ranked genes in Table 35 is determined.

[0060] When this was performed using the Internal Resection Validation Cohort of 322 samples, evaluation utilised the metastatic recurrence (MET) endpoint.

[0061] The signature genes were weighted based upon the change in HR performance (Delta HR) based upon their inclusion or exclusion. The gene ranked ‘1’ has the most negative impact on performance when removed and the gene ranked ‘70’ has the least impact on performance when removed. The results are shown in Table 36 below.

[0062] Thus, in some embodiments, gene signatures are formulated in rank order. For example a 10 gene signature could comprise the first 10 ranked genes listed in Table 36. Accordingly, in some embodiments, the expression level of at least 1, 2, 3, 4, 5, 6, 7, 8, 9 or 10 of the 10 highest ranked genes in Table 36 is determined.

[0063] The results for combined rankings are shown in Table 38. In some embodiments, gene signatures are formulated in rank order. For example a 10 gene signature could comprise from the first 10 ranked genes listed in Table 38. Accordingly, in some embodiments, the expression level of at least 1, 2, 3, 4, 5, 6, 7, 8, 9 or 10 of the 10 highest ranked genes in Table 38 is determined.

[0064] Additional gene signatures representing selections from the genes of Table 1 are described herein and are applicable to all aspects of the invention. These signatures may also provide the basis for larger signatures. The additional signatures are set forth in Tables 2 to 24, together with suitable weight and bias scores that may be adopted when calculating the final signature score (as further described herein). The k value for each signature can be set once the threshold for defining a positive signature score has been determined, as would be readily appreciated by the skilled person. Similarly, the rankings for each gene in the signature can readily be determined by reviewing the weightings attributed to each gene (where a larger weight indicates a higher ranking in the signature—see Table 1 for the rank order in respect of the 70 gene signature).

[0065] Thus, in some embodiments, the methods of the invention involve determining expression levels of at least MT1A and PCP4 (two gene signature shown in Table 2). As shown in FIGS. 2 and 3, signatures as small as the two gene signatures are capable of identifying the relevant biology and predicting metastatic recurrence. Larger signatures can be developed based upon these two genes, examples of which are given in tables 3 to 24, and in Table 1. Suitable probes and probsets to investigate expression of these genes are provided in Table 1 and 1A and primers useful to determine expression are listed in Table 1B.

TABLE 2
Two gene signature

| Entrez Gene ID | Weight | Bias |
|---|---|---|
| 4489 | −0.0854336 | 6.74796 |
| 5121 | −0.0849287 | 7.62176 |

TABLE 3
Three gene signature

| Entrez Gene ID | Weight | Bias |
|---|---|---|
| 406988 | −0.0584449 | 7.21525 |
| 4489 | −0.0594146 | 6.74796 |
| 5121 | −0.0590634 | 7.62176 |

TABLE 4
Four gene signature

| Entrez Gene ID | Weight | Bias |
|---|---|---|
| 406988 | −0.0484829 | 7.21525 |
| 4489 | −0.0492874 | 6.74796 |
| 5121 | −0.0489961 | 7.62176 |
| 827 | −0.0438564 | 4.44087 |

TABLE 5
Five gene signature

| Entrez Gene ID | Weight | Bias |
|---|---|---|
| 406988 | −0.0409374 | 7.21525 |
| 4489 | −0.0416166 | 6.74796 |
| 5121 | −0.0413707 | 7.62176 |
| 6401 | −0.0364515 | 5.97768 |
| 827 | −0.0370309 | 4.44087 |

TABLE 6
Six gene signature

| Entrez Gene ID | Weight | Bias |
|---|---|---|
| 406988 | −0.0355221 | 7.21525 |
| 4489 | −0.0361114 | 6.74796 |
| 5121 | −0.035898 | 7.62176 |
| 5354 | −0.0309227 | 4.38357 |
| 6401 | −0.0316296 | 5.97768 |
| 827 | −0.0321323 | 4.44087 |

TABLE 7
Seven gene signature

| Entrez Gene ID | Weight | Bias |
|---|---|---|
| 3852 | −0.026477 | 6.08049 |
| 406988 | −0.0314283 | 7.21525 |
| 4489 | −0.0319498 | 6.74796 |
| 5121 | −0.0317609 | 7.62176 |
| 5354 | −0.027359 | 4.38357 |
| 6401 | −0.0279844 | 5.97768 |
| 827 | −0.0284292 | 4.44087 |

TABLE 8
Eight gene signature

| Entrez Gene ID | Weight | Bias |
|---|---|---|
| 3852 | −0.0240174 | 6.08049 |
| 406988 | −0.0285088 | 7.21525 |
| 4489 | −0.0289818 | 6.74796 |
| 5121 | −0.0288105 | 7.62176 |
| 5354 | −0.0248175 | 4.38357 |
| 57481 | −0.0223493 | 3.55997 |
| 6401 | −0.0253848 | 5.97768 |
| 827 | −0.0257883 | 4.44087 |

TABLE 9
Nine gene signature

| Entrez Gene ID | Weight | Bias |
|---|---|---|
| 27063 | −0.0189187 | 5.92831 |
| 3852 | −0.022443 | 6.08049 |
| 406988 | −0.0266399 | 7.21525 |
| 4489 | −0.0270819 | 6.74796 |
| 5121 | −0.0269218 | 7.62176 |
| 5354 | −0.0231906 | 4.38357 |
| 57481 | −0.0208842 | 3.55997 |
| 6401 | −0.0237207 | 5.97768 |
| 827 | −0.0240977 | 4.44087 |

TABLE 10
Eleven gene signature

| Entrez Gene ID | Weight | Bias |
|---|---|---|
| 25907 | −0.016386 | 8.06342 |
| 27063 | −0.0169106 | 5.92831 |
| 3852 | −0.0200608 | 6.08049 |
| 406988 | −0.0238123 | 7.21525 |
| 4489 | −0.0242073 | 6.74796 |
| 5121 | −0.0240643 | 7.62176 |
| 5354 | −0.0207291 | 4.38357 |
| 57481 | −0.0186675 | 3.55997 |
| 6401 | −0.0212029 | 5.97768 |
| 827 | −0.0215399 | 4.44087 |
| 84870 | −0.0157681 | 4.29317 |

TABLE 11
Thirteen gene signature

| Entrez Gene ID | Weight | Bias |
|---|---|---|
| 25907 | −0.0150652 | 8.06342 |
| 27063 | −0.0155475 | 5.92831 |
| 3852 | −0.0184438 | 6.08049 |
| 406988 | −0.0218928 | 7.21525 |
| 4489 | −0.0222561 | 6.74796 |
| 5121 | −0.0221245 | 7.62176 |
| 5354 | −0.0190581 | 4.38357 |
| 57481 | −0.0171628 | 3.55997 |
| 6401 | −0.0194938 | 5.97768 |
| 6406 | −0.0144896 | 4.23042 |
| 7060 | −0.0144516 | 6.91259 |
| 827 | −0.0198036 | 4.44087 |
| 84870 | −0.0144971 | 4.29317 |

TABLE 12
Fifteen gene signature

| Entrez Gene ID | Weight | Bias |
|---|---|---|
| 2138 | −0.013038 | 5.50428 |
| 25907 | −0.0137554 | 8.06342 |
| 27063 | −0.0141957 | 5.92831 |
| 340419 | −0.0131822 | 3.92242 |
| 3852 | −0.0168402 | 6.08049 |
| 406988 | −0.0199894 | 7.21525 |
| 4489 | −0.020321 | 6.74796 |
| 5121 | −0.0202009 | 7.62176 |
| 5354 | −0.0174011 | 4.38357 |
| 57481 | −0.0156705 | 3.55997 |
| 6401 | −0.0177989 | 5.97768 |
| 6406 | −0.0132298 | 4.23042 |
| 7060 | −0.0131951 | 6.91259 |
| 827 | −0.0180818 | 4.44087 |
| 84870 | −0.0132366 | 4.29317 |

TABLE 13
Seventeen gene signature

| Entrez Gene ID | Weight | Bias |
|---|---|---|
| 2138 | −0.0122396 | 5.50428 |
| 2354 | −0.0114061 | 6.95494 |
| 25907 | −0.0129131 | 8.06342 |
| 27063 | −0.0133265 | 5.92831 |
| 340419 | −0.012375 | 3.92242 |
| 3852 | −0.015809 | 6.08049 |
| 4057 | −0.0113308 | 6.49726 |
| 406988 | −0.0187653 | 7.21525 |
| 4489 | −0.0190767 | 6.74796 |
| 5121 | −0.0189639 | 7.62176 |
| 5354 | −0.0163356 | 4.38357 |
| 57481 | −0.014711 | 3.55997 |
| 6401 | −0.0167091 | 5.97768 |
| 6406 | −0.0124197 | 4.23042 |
| 7060 | −0.0123871 | 6.91259 |
| 827 | −0.0169746 | 4.44087 |
| 84870 | −0.0124261 | 4.29317 |

TABLE 14
Nineteen gene signature

| Entrez Gene ID | Weight | Bias |
|---|---|---|
| 12 | −0.0105382 | 5.74546 |
| 2138 | −0.011593 | 5.50428 |
| 2354 | −0.0108034 | 6.95494 |
| 25907 | −0.0122308 | 8.06342 |
| 27063 | −0.0126224 | 5.92831 |
| 340419 | −0.0117212 | 3.92242 |
| 3852 | −0.0149737 | 6.08049 |
| 4057 | −0.0107322 | 6.49726 |
| 406988 | −0.0177739 | 7.21525 |
| 4489 | −0.0180688 | 6.74796 |
| 5121 | −0.017962 | 7.62176 |
| 5354 | −0.0154725 | 4.38357 |
| 57481 | −0.0139337 | 3.55997 |
| 6401 | −0.0158262 | 5.97768 |
| 6406 | −0.0117635 | 4.23042 |
| 7060 | −0.0117327 | 6.91259 |
| 7538 | −0.0101011 | 9.96083 |
| 827 | −0.0160778 | 4.44087 |
| 84870 | −0.0117696 | 4.29317 |

TABLE 15
Twenty two gene signature

| Entrez Gene ID | Weight | Bias |
|---|---|---|
| 12 | −0.0102163 | 5.74546 |
| 2138 | −0.0112388 | 5.50428 |
| 2354 | −0.0104734 | 6.95494 |
| 25907 | −0.0118571 | 8.06342 |
| 27063 | −0.0122367 | 5.92831 |
| 340419 | −0.0113631 | 3.92242 |
| 3852 | −0.0145163 | 6.08049 |
| 4057 | −0.0104043 | 6.49726 |
| 406988 | −0.0172309 | 7.21525 |
| 4489 | −0.0175167 | 6.74796 |
| 4604 | −0.0069325 | 4.57432 |
| 50636 | −0.0064135 | 6.52255 |
| 5121 | −0.0174132 | 7.62176 |
| 5354 | −0.0149998 | 4.38357 |
| 57481 | −0.013508 | 3.55997 |
| 6401 | −0.0153427 | 5.97768 |
| 6406 | −0.0114041 | 4.23042 |
| 7060 | −0.0113742 | 6.91259 |
| 7538 | −0.0097925 | 9.96083 |
| 827 | −0.0155866 | 4.44087 |
| 84870 | −0.01141 | 4.29317 |
| 9232 | 0.00804755 | 4.71269 |

TABLE 16
Twenty five gene signature

| Entrez Gene ID | Weight | Bias |
|---|---|---|
| 12 | −0.0101819 | 5.74546 |
| 2138 | −0.011201 | 5.50428 |
| 2354 | −0.0104381 | 6.95494 |
| 25907 | −0.0118172 | 8.06342 |
| 27063 | −0.0121956 | 5.92831 |
| 340419 | −0.0113249 | 3.92242 |
| 3852 | −0.0144674 | 6.08049 |
| 4057 | −0.0103693 | 6.49726 |
| 406988 | −0.0171729 | 7.21525 |
| 4489 | −0.0174578 | 6.74796 |
| 4604 | −0.0069091 | 4.57432 |
| 50636 | −0.0063919 | 6.52255 |
| 50652 | −0.0035123 | 5.26234 |
| 5121 | −0.0173546 | 7.62176 |
| 5354 | −0.0149493 | 4.38357 |
| 57481 | −0.0134626 | 3.55997 |
| 6401 | −0.0152911 | 5.97768 |
| 6406 | −0.0113657 | 4.23042 |
| 7060 | −0.0113359 | 6.91259 |
| 7538 | −0.0097595 | 9.96083 |
| 79054 | −0.0029055 | 4.86579 |
| 79689 | −0.0041936 | 8.1053 |
| 827 | −0.0155341 | 4.44087 |
| 84870 | −0.0113716 | 4.29317 |
| 9232 | 0.00802047 | 4.71269 |

TABLE 17
Twenty eight gene signature

| Entrez Gene ID | Weight | Bias |
|---|---|---|
| 12 | −0.0113703 | 5.74546 |
| 2138 | −0.0102938 | 5.50428 |
| 2354 | −0.0091518 | 6.95494 |
| 25907 | −0.0112273 | 8.06342 |
| 27063 | −0.0109933 | 5.92831 |
| 2920 | −0.0080439 | 8.92898 |
| 340419 | −0.0103778 | 3.92242 |
| 3852 | −0.0118207 | 6.08049 |
| 4057 | −0.0105916 | 6.49726 |
| 406988 | −0.0163129 | 7.21525 |
| 4489 | −0.0148319 | 6.74796 |
| 4604 | −0.0117356 | 4.57432 |
| 50636 | −0.0122781 | 6.52255 |
| 50652 | −0.0100098 | 5.26234 |
| 5121 | −0.0131977 | 7.62176 |
| 5354 | −0.0145474 | 4.38357 |
| 57481 | −0.0112327 | 3.55997 |
| 6401 | −0.0109283 | 5.97768 |
| 6406 | −0.0125967 | 4.23042 |
| 644844 | −0.008567 | 5.18357 |
| 693163 | −0.0087554 | 5.08739 |
| 7060 | −0.0156046 | 6.91259 |
| 7538 | −0.009639 | 9.96083 |
| 79054 | −0.0094113 | 4.86579 |
| 79689 | −0.0090982 | 8.1053 |
| 827 | −0.0185353 | 4.44087 |
| 84870 | −0.0120577 | 4.29317 |
| 9232 | 0.0102357 | 4.71269 |

TABLE 18
Thirty two gene signature

| Entrez Gene ID | Weight | Bias |
|---|---|---|
| 12 | −0.010156 | 5.74546 |
| 2138 | −0.0084546 | 5.50428 |
| 2354 | −0.0105369 | 6.95494 |
| 25907 | −0.0093177 | 8.06342 |
| 27063 | −0.0095296 | 5.92831 |
| 2920 | −0.0082867 | 8.92898 |
| 340419 | −0.008292 | 3.92242 |
| 3852 | −0.0097028 | 6.08049 |
| 4057 | −0.0081905 | 6.49726 |
| 406988 | −0.0120927 | 7.21525 |
| 4316 | −0.0073912 | 6.75672 |
| 4489 | −0.012495 | 6.74796 |
| 4604 | −0.0121787 | 4.57432 |
| 50636 | −0.0122014 | 6.52255 |
| 50652 | −0.0102362 | 5.26234 |
| 5121 | −0.010326 | 7.62176 |
| 5179 | −0.0077226 | 4.51486 |
| 5354 | −0.0133628 | 4.38357 |
| 57481 | −0.0095722 | 3.55997 |
| 6401 | −0.010634 | 5.97768 |
| 6406 | −0.0118163 | 4.23042 |
| 644844 | −0.0099334 | 5.18357 |
| 693163 | −0.0098705 | 5.08739 |
| 7060 | −0.0142594 | 6.91259 |
| 7538 | −0.0103042 | 9.96083 |
| 79054 | −0.0101624 | 4.86579 |
| 79689 | −0.0093796 | 8.1053 |
| 827 | −0.0166256 | 4.44087 |
| 84870 | −0.010646 | 4.29317 |
| 9232 | 0.00927419 | 4.71269 |
| 9506 | −0.008145 | 7.07391 |
| 9955 | −0.007857 | 4.23278 |

TABLE 19
Thirty six gene signature

| Entrez Gene ID | Weight | Bias |
|---|---|---|
| 12 | −0.0093135 | 5.74546 |
| 130733 | −0.0075817 | 7.59453 |
| 2138 | −0.0084016 | 5.50428 |
| 2354 | −0.0099522 | 6.95494 |
| 25907 | −0.0091246 | 8.06342 |
| 27063 | −0.0096954 | 5.92831 |
| 283194 | −0.0076884 | 4.98038 |
| 2920 | −0.0082441 | 8.92898 |
| 340419 | −0.0081949 | 3.92242 |
| 3852 | −0.0098646 | 6.08049 |
| 4057 | −0.0080168 | 6.49726 |
| 406988 | −0.0121601 | 7.21525 |
| 4316 | −0.008168 | 6.75672 |
| 4489 | −0.0123296 | 6.74796 |
| 4604 | −0.0103293 | 4.57432 |
| 50636 | −0.0106303 | 6.52255 |
| 50652 | −0.008396 | 5.26234 |
| 51050 | −0.0074885 | 4.85872 |
| 5121 | −0.0106667 | 7.62176 |
| 5179 | −0.0079247 | 4.51486 |
| 5317 | −0.0073104 | 5.91219 |
| 5354 | −0.012805 | 4.38357 |
| 57481 | −0.0094443 | 3.55997 |
| 6401 | −0.0105376 | 5.97768 |
| 6406 | −0.0117042 | 4.23042 |
| 644844 | −0.007735 | 5.18357 |
| 693163 | −0.0085964 | 5.08739 |
| 7060 | −0.0129938 | 6.91259 |
| 7538 | −0.009653 | 9.96083 |
| 79054 | −0.0084699 | 4.86579 |
| 79689 | −0.0078376 | 8.1053 |
| 827 | −0.0155276 | 4.44087 |
| 84870 | −0.0103741 | 4.29317 |
| 9232 | 0.00860486 | 4.71269 |
| 9506 | −0.0083385 | 7.07391 |
| 9955 | −0.0078923 | 4.23278 |

TABLE 20
Forty gene signature

| Entrez Gene ID | Weight | Bias |
|---|---|---|
| 12 | −0.0088635 | 5.74546 |
| 130733 | −0.0073773 | 7.59453 |
| 2138 | −0.0081002 | 5.50428 |
| 2354 | −0.0089276 | 6.95494 |
| 23764 | −0.0070488 | 8.49795 |
| 25907 | −0.0086677 | 8.06342 |
| 27063 | −0.0091158 | 5.92831 |
| 283194 | −0.0077222 | 4.98038 |
| 2920 | −0.0074337 | 8.92898 |
| 340419 | −0.0079644 | 3.92242 |
| 3852 | −0.0093986 | 6.08049 |
| 4057 | −0.0076408 | 6.49726 |
| 406988 | −0.0117445 | 7.21525 |
| 4316 | −0.0078189 | 6.75672 |
| 4489 | −0.0117016 | 6.74796 |
| 4588 | −0.0072195 | 6.64004 |
| 4604 | −0.0102513 | 4.57432 |
| 5054 | −0.007115 | 6.69187 |
| 50636 | −0.0102281 | 6.52255 |
| 50652 | −0.0081408 | 5.26234 |
| 51050 | −0.007475 | 4.85872 |
| 5121 | −0.0102856 | 7.62176 |
| 5179 | −0.0076867 | 4.51486 |
| 5317 | −0.0072532 | 5.91219 |
| 5354 | −0.0124218 | 4.38357 |
| 57481 | −0.0091711 | 3.55997 |
| 6401 | −0.0097774 | 5.97768 |
| 6406 | −0.0108845 | 4.23042 |
| 644844 | −0.0074985 | 5.18357 |
| 693163 | −0.0079773 | 5.08739 |
| 7060 | −0.012659 | 6.91259 |
| 7083 | 0.00689113 | 5.58133 |
| 7538 | −0.0089554 | 9.96083 |
| 79054 | −0.0080402 | 4.86579 |
| 79689 | −0.0074587 | 8.1053 |
| 827 | −0.0150968 | 4.44087 |
| 84870 | −0.0101513 | 4.29317 |
| 9232 | 0.00824867 | 4.71269 |
| 9506 | −0.0081624 | 7.07391 |
| 9955 | −0.0075526 | 4.23278 |

TABLE 21
Forty five gene signature

| Entrez Gene ID | Weight | Bias |
|---|---|---|
| 12 | −0.0084719 | 5.74546 |
| 130733 | −0.0071653 | 7.59453 |
| 2138 | −0.0076354 | 5.50428 |
| 2354 | −0.0086978 | 6.95494 |
| 23764 | −0.0068137 | 8.49795 |
| 25907 | −0.0081883 | 8.06342 |
| 27063 | −0.0095258 | 5.92831 |
| 283194 | −0.0073756 | 4.98038 |
| 2920 | −0.0074016 | 8.92898 |
| 340419 | −0.0072676 | 3.92242 |
| 3852 | −0.0086227 | 6.08049 |
| 4057 | −0.0076939 | 6.49726 |
| 406988 | −0.0109582 | 7.21525 |
| 4316 | −0.007433 | 6.75672 |
| 4489 | −0.0109596 | 6.74796 |
| 4588 | −0.0068952 | 6.64004 |
| 4604 | −0.0089751 | 4.57432 |
| 5054 | −0.0070642 | 6.69187 |
| 50636 | −0.0095383 | 6.52255 |
| 50652 | −0.0076953 | 5.26234 |
| 51050 | −0.0067347 | 4.85872 |
| 5121 | −0.0090383 | 7.62176 |
| 5166 | −0.0064467 | 4.17409 |
| 5179 | −0.0069808 | 4.51486 |
| 5317 | −0.0069448 | 5.91219 |
| 5354 | −0.0114369 | 4.38357 |
| 563 | −0.0062549 | 8.19118 |
| 57481 | −0.008131 | 3.55997 |
| 6401 | −0.0090862 | 5.97768 |
| 6406 | −0.0097387 | 4.23042 |
| 644844 | −0.0069075 | 5.18357 |
| 693163 | −0.007503 | 5.08739 |
| 7060 | −0.0117799 | 6.91259 |
| 7083 | 0.00695478 | 5.58133 |
| 7538 | −0.008409 | 9.96083 |
| 7739 | −0.0062004 | 6.90054 |
| 79054 | −0.0076792 | 4.86579 |
| 79689 | −0.0072917 | 8.1053 |
| 827 | −0.0138725 | 4.44087 |
| 84870 | −0.0094612 | 4.29317 |
| 84889 | −0.0067268 | 4.649 |
| 91661 | −0.0062403 | 3.97633 |
| 9232 | 0.00773594 | 4.71269 |
| 9506 | −0.0074141 | 7.07391 |
| 9955 | −0.0072818 | 4.23278 |

TABLE 22
Fifty gene signature

| Entrez Gene ID | Weight | Bias |
|---|---|---|
| 100616163 | −0.0060146 | 10.5365 |
| 1164 | 0.00596174 | 6.50398 |
| 12 | −0.00788 | 5.74546 |
| 130733 | −0.0070582 | 7.59453 |
| 152 | −0.005916 | 7.07838 |
| 1672 | −0.0057271 | 6.82549 |
| 2138 | −0.0069005 | 5.50428 |
| 2354 | −0.0074259 | 6.95494 |
| 23764 | −0.0060195 | 8.49795 |
| 25907 | −0.0076929 | 8.06342 |
| 27063 | −0.0084041 | 5.92831 |
| 283194 | −0.0075818 | 4.98038 |
| 2920 | −0.0062969 | 8.92898 |
| 340419 | −0.006979 | 3.92242 |
| 3832 | 0.00580874 | 3.91767 |
| 3852 | −0.0073413 | 6.08049 |
| 4057 | −0.0068257 | 6.49726 |
| 406988 | −0.0093852 | 7.21525 |
| 4316 | −0.0070704 | 6.75672 |
| 4489 | −0.0103164 | 6.74796 |
| 4588 | −0.0065059 | 6.64004 |
| 4604 | −0.0088755 | 4.57432 |
| 5054 | −0.0064482 | 6.69187 |
| 50636 | −0.0093967 | 6.52255 |
| 50652 | −0.0078998 | 5.26234 |
| 51050 | −0.0064943 | 4.85872 |
| 5121 | −0.0085839 | 7.62176 |
| 5166 | −0.0061711 | 4.17409 |
| 5179 | −0.0066949 | 4.51486 |
| 5317 | −0.0069413 | 5.91219 |
| 5354 | −0.0110133 | 4.38357 |
| 563 | −0.0062503 | 8.19118 |
| 57481 | −0.0076625 | 3.55997 |
| 6401 | −0.0082619 | 5.97768 |
| 6406 | −0.0090315 | 4.23042 |
| 644844 | −0.0073783 | 5.18357 |
| 693163 | −0.0068836 | 5.08739 |
| 7060 | −0.012155 | 6.91259 |
| 7083 | 0.00620598 | 5.58133 |
| 7538 | −0.0076694 | 9.96083 |
| 7739 | −0.0060281 | 6.90054 |
| 79054 | −0.0078154 | 4.86579 |
| 79689 | −0.0071002 | 8.1053 |
| 827 | −0.0134928 | 4.44087 |
| 84870 | −0.0091115 | 4.29317 |
| 84889 | −0.0067284 | 4.649 |
| 91661 | −0.0062814 | 3.97633 |
| 9232 | 0.00694781 | 4.71269 |
| 9506 | −0.0070319 | 7.07391 |
| 9955 | −0.0067662 | 4.23278 |

TABLE 23
Fifty six gene signature

| Entrez Gene ID | Weight | Bias |
|---|---|---|
| 100616163 | −0.005861 | 10.5365 |
| 10257 | −0.0050496 | 5.23038 |
| 1164 | 0.00569625 | 6.50398 |
| 12 | −0.0073822 | 5.74546 |
| 130733 | −0.006436 | 7.59453 |
| 152 | −0.0058338 | 7.07838 |
| 1672 | −0.0055123 | 6.82549 |
| 2138 | −0.0068171 | 5.50428 |
| 2354 | −0.0071035 | 6.95494 |
| 23764 | −0.0056449 | 8.49795 |
| 23784 | −0.0055006 | 4.82498 |
| 25907 | −0.0075056 | 8.06342 |
| 27063 | −0.0082314 | 5.92831 |
| 283194 | −0.0066926 | 4.98038 |
| 2920 | −0.0062953 | 8.92898 |
| 340419 | −0.0068818 | 3.92242 |
| 3832 | 0.00560094 | 3.91767 |
| 3852 | −0.0072034 | 6.08049 |
| 4057 | −0.0066854 | 6.49726 |
| 406988 | −0.0090297 | 7.21525 |
| 4316 | −0.006866 | 6.75672 |
| 4489 | −0.0101527 | 6.74796 |
| 4588 | −0.0062002 | 6.64004 |
| 4604 | −0.008045 | 4.57432 |
| 5054 | −0.0059681 | 6.69187 |
| 50636 | −0.008568 | 6.52255 |
| 50652 | −0.0069136 | 5.26234 |
| 51050 | −0.006074 | 4.85872 |
| 5121 | −0.0084668 | 7.62176 |
| 5166 | −0.0062193 | 4.17409 |
| 5179 | −0.0067401 | 4.51486 |
| 5317 | −0.0062775 | 5.91219 |
| 5346 | 0.00544079 | 4.62939 |
| 5354 | −0.0107509 | 4.38357 |
| 563 | −0.0057774 | 8.19118 |
| 57176 | 0.0054321 | 5.22346 |
| 57481 | −0.0075962 | 3.55997 |
| 6401 | −0.0079086 | 5.97768 |
| 6406 | −0.0089768 | 4.23042 |
| 644844 | −0.0063947 | 5.18357 |
| 6614 | 0.00529568 | 5.50375 |
| 693163 | −0.0062258 | 5.08739 |
| 7060 | −0.0113086 | 6.91259 |
| 7083 | 0.00606898 | 5.58133 |
| 7538 | −0.0073458 | 9.96083 |
| 7739 | −0.0059453 | 6.90054 |
| 79054 | −0.0069339 | 4.86579 |
| 79689 | −0.0063605 | 8.1053 |
| 827 | −0.0130713 | 4.44087 |
| 84870 | −0.0092604 | 4.29317 |
| 84889 | −0.0064006 | 4.649 |
| 9076 | −0.0053751 | 4.96028 |
| 91661 | −0.0056536 | 3.97633 |
| 9232 | 0.00664308 | 4.71269 |
| 9506 | −0.0069717 | 7.07391 |
| 9955 | −0.0067533 | 4.23278 |

TABLE 24
Sixty three gene signature

| Entrez Gene ID | Weight | Bias |
|---|---|---|
| 100616163 | −0.005042 | 10.5365 |
| 101928017 | −0.0048527 | 6.06588 |
| 10257 | −0.0056574 | 5.23038 |
| 1164 | 0.0052823 | 6.50398 |
| 12 | −0.0073342 | 5.74546 |
| 130733 | −0.0062765 | 7.59453 |
| 152 | −0.0051502 | 7.07838 |
| 1672 | −0.0052785 | 6.82549 |
| 1847 | −0.0048311 | 5.76268 |
| 2138 | −0.0056248 | 5.50428 |
| 2354 | −0.0064848 | 6.95494 |
| 23764 | −0.0051811 | 8.49795 |
| 23784 | −0.0058458 | 4.82498 |
| 25907 | −0.0062868 | 8.06342 |
| 27063 | −0.0071516 | 5.92831 |
| 283194 | −0.0071346 | 4.98038 |
| 285016 | −0.0045118 | 6.6646 |
| 2920 | −0.0056286 | 8.92898 |
| 29951 | −0.0049994 | 4.75233 |
| 340419 | −0.0056458 | 3.92242 |
| 3832 | 0.00505389 | 3.91767 |
| 3852 | −0.0064458 | 6.08049 |
| 4057 | −0.0063934 | 6.49726 |
| 406988 | −0.0083826 | 7.21525 |
| 4316 | −0.0069549 | 6.75672 |
| 4489 | −0.0087025 | 6.74796 |
| 4588 | −0.0062676 | 6.64004 |
| 4604 | −0.0080954 | 4.57432 |
| 5054 | −0.0056402 | 6.69187 |
| 50636 | −0.0080538 | 6.52255 |
| 50652 | −0.0072374 | 5.26234 |
| 51050 | −0.0056617 | 4.85872 |
| 5121 | −0.0071957 | 7.62176 |
| 5166 | −0.0052681 | 4.17409 |
| 5179 | −0.0052589 | 4.51486 |
| 5317 | −0.0062761 | 5.91219 |
| 5346 | 0.00537235 | 4.62939 |
| 5354 | −0.009133 | 4.38357 |
| 563 | −0.0057921 | 8.19118 |
| 56849 | −0.0048508 | 4.81933 |
| 57176 | 0.00516736 | 5.22346 |
| 57481 | −0.0063163 | 3.55997 |
| 6401 | −0.0069775 | 5.97768 |
| 6406 | −0.0081782 | 4.23042 |
| 6422 | −0.0048345 | 7.90126 |
| 644844 | −0.0064333 | 5.18357 |
| 6614 | 0.00520155 | 5.50375 |
| 693163 | −0.0060983 | 5.08739 |
| 7060 | −0.0108538 | 6.91259 |
| 7083 | 0.00523833 | 5.58133 |
| 7538 | −0.0065682 | 9.96083 |
| 7739 | −0.0050779 | 6.90054 |
| 79054 | −0.0071048 | 4.86579 |
| 79689 | −0.0063567 | 8.1053 |
| 8076 | −0.0047141 | 4.12918 |
| 827 | −0.011285 | 4.44087 |
| 84870 | −0.0075344 | 4.29317 |
| 84889 | −0.0058044 | 4.649 |
| 9076 | −0.0052058 | 4.96028 |
| 91661 | −0.0054622 | 3.97633 |
| 9232 | 0.00626422 | 4.71269 |
| 9506 | −0.0058269 | 7.07391 |
| 9955 | −0.0055209 | 4.23278 |

[0066] In some embodiments, applicable to all aspects of the invention, the expression level of PDK4 alone is not measured. PDK4 expression is thus typically measured in combination with at least one further gene up to all 69 further genes from table 1. In some embodiments, PDK4 expression is determined using an assay targeting a sequence within the full sequences of SEQ ID NO: 52, 53, 63, 108, 09, 152, 153, 157, 158, 184, 194 and/or 216 respectively. In some embodiments, PDK4 expression is determined using an assay targeting a sequence within the target sequences of SEQ ID NO: 284, 285, 295, 340, 341, 384, 385, 389, 390, 416, 426 and/or 448 respectively. In some embodiments PDK4 expression is determined using one or more probes selected from SEQ ID Nos: 1011-1021, 1022-1032, 1132-1142, 1627-1637, 1638-1648, 2122-2132, 2133-2143, 2177-2187, 2188-2198, 2474-2484, 2584-2594 and 2834-2844 or probe sets of SEQ ID Nos: 1011-1021, 1022-1032, 1132-1142, 1627-1637, 1638-1648, 2122-2132, 2133-2143, 2177-2187, 2188-2198, 2474-2484, 2584-2594 and/or 2834-2844. In some embodiments, PDK4 expression is determined using an amplification (PCR, or qPCR) assay employing primers of SEQ ID NO: 3053 and/or 3121 respectively.

[0067] In some embodiments, applicable to all aspects of the invention, the expression level of KIF11, PTTG1 or TK1 alone is not measured. In some embodiments, the expression levels of KIF11, PTTG1 and TK1 may be measured together as a 3 gene signature. In some embodiments, the expression levels of KIF11, PTTG1 and/or TK1 may be measured in combination with at least one further gene from Table 1, including forming the 70 gene signature. In some embodiments, KIF11 expression is determined using an assay targeting a sequence within the full sequences of SEQ ID NO: 180 and/or 181 respectively. In some embodiments, KIF11 expression is determined using an assay targeting a sequence within the target sequences of SEQ ID NO: 412 and/or 413 respectively. In some embodiments KIF11 expression is determined using one or more probes selected from SEQ ID Nos: 2430-2440 and 2441-2451 or probe sets of SEQ ID Nos: 2430-2440 and/or 2441-2451. In some embodiments, KIF11 expression is determined using an amplification (PCR, or qPCR) assay employing primers of SEQ ID NO: 3062 and/or 3130 respectively.

[0068] In some embodiments, PTTG1 expression is determined using an assay targeting a sequence within the full sequences of SEQ ID NO: 62 and/or 201 respectively. In some embodiments, PTTG1 expression is determined using an assay targeting a sequence within the target sequences of SEQ ID NO: 294 and/or 433 respectively. In some embodiments PTTG1 expression is determined using one or more probes selected from SEQ ID Nos: 1121-1131 and 2661-2671 or probe sets of SEQ ID Nos: 1121-1131 and/or 2661-2671. In some embodiments, PTTG1 expression is determined using an amplification (PCR, or qPCR) assay employing primers of SEQ ID NO: 3037 and/or 3105 respectively.

[0069] In some embodiments, TK1 expression is determined using an assay targeting a sequence within the full sequence of SEQ ID NO: 197. In some embodiments, TK1 expression is determined using an assay targeting a sequence within the target sequence of SEQ ID NO: 429. In some embodiments TK1 expression is determined using one or more probes selected from SEQ ID Nos: 2617-2627 or probe sets of SEQ ID Nos: 2617-2627. In some embodiments, TK1 expression is determined using an amplification (PCR, or qPCR) assay employing primers of SEQ ID NO: 3060 and/or 3128 respectively.

[0070] In some embodiments, applicable to all aspects of the invention, the expression level of ANO7 or MYBPC1 alone is not measured. In some embodiments, the expression levels of ANO7 and MYBPC1 may be measured together as a 2 gene signature. In some embodiments, the expression levels of ANO7 and/or MYBPC1 may be measured in combination with at least one further gene from Table 1, including forming the 70 gene signature.

[0071] In some embodiments, ANO7 expression is determined using an assay targeting a sequence within the full sequences of SEQ ID NO: 37, 38, 125, 205 and/or 206 respectively. In some embodiments, ANO7 expression is determined using an assay targeting a sequence within the target sequences of SEQ ID NO: 269, 270, 357, 437 and/or 438 respectively. In some embodiments ANO7 expression is determined using one or more probes selected from SEQ

[0072] ID Nos: 849-859, 860-870, 1825-1835, 2715-2724 and 2725-2735 or probe sets of SEQ ID Nos: 849-859, 860-870, 1825-1835, 2715-2724 and/or 2725-2735. In some embodiments, ANO7 expression is determined using an amplification (PCR, or qPCR) assay employing primers of SEQ ID NO: 3022 and/or 3090 respectively.

[0073] In some embodiments, MYBPC1 expression is determined using an assay targeting a sequence within the full sequences of SEQ ID NO: 39, 40, 74, 75, 101, 102, 103 and/or 144 respectively. In some embodiments, MYBPC1 expression is determined using an assay targeting a sequence within the target sequences of SEQ ID NO: 271, 272, 306, 307, 333, 334, 335 and/or 376 respectively. In some embodiments MYBPC1 expression is determined using one or more probes selected from SEQ ID Nos: 871-881, 882-892, 1253-1263, 1264-1274, 1550-1560, 1561-1571, 1572-1582 and 2034-2044 or probe sets of SEQ ID Nos: 871-881, 882-892, 1253-1263, 1264-1274, 1550-1560, 1561-1571, 1572-1582 and/or 2034-2044.

[0074] In some embodiments, MYBPC1 expression is determined using an amplification (PCR, or qPCR) assay employing primers of SEQ ID NO: 3025 and/or 3093 respectively.

[0075] By “characterization” is meant classification and/or evaluation of the cancer, such as prostate cancer or ER positive breast cancer. Thus, the methods of the invention allow cancers with high metastic potential to be identified for example. The methods rely upon determining whether the cancer is a metastatic biology cancer or a non-metastatic biology cancer. The methods permit cancers to be identified that are likely to recur. Prognosis refers to predicting the likely outcome of the cancer, such as prostate cancer or ER positive breast cancer for the subject. A bad or poor prognosis as determined herein, indicates an increased likelihood of metastases and/or a higher likelihood or recurrence. By diagnosis is meant identifying the presence of a cancer, of a particular type such as prostate cancer or ER positive breast cancer with an increased metastatic potential. Thus, it will be readily apparent that there is some overlap between the terms “characterization”, “prognosis” and “diagnosis” as adopted herein. The use of relative terms indicates the position vis a vis cancers which do not display the relevant gene expression characteristics and thus have lower metastatic potential, are less likely to recur and/or have a good prognosis. The gene signatures described herein may be useful to stratify (prostate) cancer patients who have been diagnosed, in particular at an early stage, and identify those at increased risk of developing more aggressive high risk disease. This more aggressive disease may develop within 3-5 years of treatment. The initial treatment may be radiotherapy and/or surgery (prostatectomy) for example. Upon identification of the aggressive disease, the methods may require treatments as described herein to be utilized. In the absence of cancer with high metastatic potential, the subject may be placed under active surveillance and not further treated, at least initially. Further monitoring, by any suitable means (including use of PSA monitoring or by performing the methods of the invention) can be used to determine whether further intervention is required.

[0076] In some embodiments the characterisation of and/or prognosis for the cancer, such as prostate cancer or ER positive breast cancer may comprise, consist essentially of or consist of predicting an increased likelihood of recurrence. Cancers with the metastatic biology are shown herein to be more likely to recur. The characterisation of and/or prognosis for the cancer, such as prostate cancer or ER positive breast cancer may comprise, consist essentially of or consist of predicting a reduced time to recurrence. Recurrence may be considered co-terminus with relapse, as would be understood by the skilled person.

[0077] Recurrence may be clinical recurrence, metastatic recurrence or biochemical recurrence. In the context of prostate cancer biochemical recurrence means a rise in the level of PSA in a subject after treatment for prostate cancer. Biochemical recurrence may indicate that the prostate cancer has not been treated effectively or has recurred. Recurrence may be following surgery, for example radical prostatectomy and/or following radiotherapy.

[0078] In some embodiments, the characterisation of and/or prognosis for the cancer, such as prostate cancer or ER positive breast cancer may comprise, consist essentially of or consist of predicting an increased likelihood of metastasis. Metastasis, or metastatic disease, is the spread of a cancer from one organ or part to another non-adjacent organ or part. The new occurrences of disease thus generated are referred to as metastases. In certain embodiments, the methods of the invention are used to facilitate metastases staging of cancer, in particular prostate cancer. Thus, determined expression levels (e.g. determination of a gene signature positive sample) can be used to stage a subject as M1. M1 means that metastases are present (i.e. the cancer has spread to other parts of the body). For gene signature negative samples, that subject may be staged as M0. M0 means that the cancer has not yet spread to other parts of the body. Such methods may be used in conjunction with other measures used to identify metastases e.g. imaging/scanning techniques. Thus, the invention provides a method for metastases staging of a cancer comprising determining the expression level of at least one gene selected from Table 1 in a sample from the subject wherein the determined expression level is used to identify whether a subject has a M1 or M0 cancer. Thus, in some embodiments, the methods may comprise:

[0079] (i) determining the expression level of at least one gene selected from Table 1 in a sample from the subject; and

[0080] (ii) assessing from the expression level of the at least one gene whether the sample from the subject is positive or negative for a gene signature comprising the at least one gene. Suitable gene signatures and derivations of signature scores are discussed in further detail herein.

[0081] In some embodiments, characterisation of and/or prognosis for the cancer, such as prostate cancer or ER positive breast cancer may also comprise, consist essentially of or consist of determining whether the cancer has a poor prognosis. A poor prognosis may be a reduced likelihood of cause-specific, i.e. cancer-specific, or long term survival. Cause- or Cancer-specific survival is a net survival measure representing cancer survival in the absence of other causes of death. Cancer survival may be for 6, 7, 8, 9, 10, 11, 12 months or 1, 2, 3, 4, 5 etc. years. Long-term survival may be survival for 1 year, 5 years, 10 years or 20 years following diagnosis. A cancer, such as prostate cancer or ER positive breast cancer with a poor prognosis may be aggressive, fast growing, and/or show resistance to treatment.

[0082] In certain embodiments an increased expression level of at least one gene selected from Table 1 with a positive weight indicates an increased likelihood of recurrence and/or metastasis and/or a poor prognosis.

[0083] In further embodiments a decreased expression level of at least one gene selected from Table 1 with a negative weight indicates an increased likelihood of recurrence and/or metastasis and/or a poor prognosis.

[0084] Expression levels are weighted accordingly, to account for their contribution to gene signature score as discussed herein. A threshold of expression may be set relative to a median level against which “signature positive” and “signature negative” expression values can be set. Examples of such median threshold expression levels and corresponding signature positive and negative values are set forth in table 25 immediately below. As can be seen, the median values are set individually for each dataset as would be understood by one skilled in the art:

TABLE 25
Median threshold expression levels for genes in 70 gene signature

| | R0185 | | | Taylor | | | Clinical Validation | | |
|---|---|---|---|---|---|---|---|---|---|
| | Up/Down Regulation | | | Up/Down Regulation | | | Up/Down Regulation | | |
| Gene Name | Median Threshold | Sig Pos | Sig Neg | Median Threshold | Sig Pos | Sig Neg | Median Threshold | Sig Pos | Sig Neg |
| CAPN6 | 4.42188 | 2.04472 | 6.43372 | 5.5318 | 5.3482 | 5.6302 | 6.315475 | 4.074 | 6.559 |
| THBS4 | 7.06852 | 5.02893 | 8.08507 | 6.09006 | 5.6854 | 6.2519 | 8.91341 | 8.7459 | 8.9505 |
| PLP1 | 4.5448 | 2.06305 | 6.49898 | 4.31333 | 4.3854 | 4.2517 | 3.456275 | 2.4345 | 3.7365 |
| MT1A | 6.387205 | 4.06229 | 8.97844 | 4.93781 | 4.5807 | 5.1455 | 6.518785 | 5.6427 | 6.7175 |
| MIR205HG | 8.00701 | 4.87658 | 9.24825 | 7.57876 | 7.1084 | 7.8151 | 8.97736 | 7.025 | 9.2159 |
| SEMG1 | 2.69399 | 2.3506 | 4.17395 | 3.37923 | 3.5178 | 3.2859 | 2.69531 | 2.6214 | 2.6953 |
| RSPO3 | 4.82032 | 2.0699 | 5.78781 | 8.8968 | 8.8373 | 8.9397 | 4.2128 | 2.2819 | 4.5188 |
| ANO7 | 6.46441 | 5.67131 | 7.44695 | 8.4678 | 8.3131 | 8.5449 | 8.683835 | 7.5313 | 8.7909 |
| PCP4 | 8.503335 | 5.4613 | 9.81501 | 7.95265 | 7.4887 | 8.2149 | 10.01705 | 8.9437 | 10.12 |
| ANKRD1 | 5.610625 | 3.90673 | 7.45987 | 4.25165 | 4.0009 | 4.3893 | 5.15809 | 3.17 | 5.6713 |
| MYBPC1 | 4.45984 | 2.87008 | 5.58119 | 3.16997 | 3.027 | 3.2647 | 6.173885 | 5.0181 | 6.3699 |
| MMP7 | 7.64552 | 3.63728 | 8.81375 | 2.21155 | 2.2597 | 2.1786 | 8.26743 | 6.6757 | 8.4475 |
| SERPINA3 | 5.8349 | 4.17103 | 6.62491 | 8.08507 | 5.9558 | 8.9948 | 6.869015 | 5.3198 | 7.0793 |
| SELE | 6.69364 | 3.42413 | 7.66659 | 4.86743 | 4.5184 | 5.0608 | 5.46303 | 4.3339 | 5.704 |
| KRT5 | 6.719415 | 3.43284 | 7.9083 | 8.22671 | 8.2267 | 8.2313 | 7.707815 | 6.5433 | 7.9614 |
| LTF | 5.83487 | 5.06191 | 7.70167 | 4.45153 | 4.174 | 4.5963 | 7.3738 | 6.3697 | 7.7314 |
| KlAA1210 | 2.74592 | 1.56824 | 5.50166 | 4.76043 | 4.9023 | 4.6617 | 4.578835 | 2.6833 | 4.7082 |
| TMEM158 | 8.40747 | 6.66104 | 9.3172 | 8.39763 | 8.1777 | 8.4845 | 7.655895 | 6.768 | 7.7878 |
| ZFP36 | 10.39315 | 8.80059 | 11.1231 | 9.73981 | 8.5152 | 10.592 | 10.6163 | 9.1513 | 10.895 |
| FOSB | 7.316875 | 5.1803 | 8.05011 | 8.35888 | 7.219 | 9.0206 | 7.957285 | 5.6257 | 8.6746 |
| PCA3 | 4.782625 | 4.3872 | 4.90232 | 11.4346 | 10.271 | 12.114 | 8.352805 | 8.0957 | 8.3847 |
| TRPM8 | 4.860835 | 4.0207 | 5.13583 | 4.78668 | 4.5937 | 4.9832 | 6.09048 | 6.1888 | 6.0901 |
| PTTG1 | 4.38243 | 5.40862 | 3.73654 | 3.05421 | 2.9145 | 3.135 | 3.73654 | 4.0886 | 3.6952 |
| #N/A | 4.87794 | 4.92985 | 4.85895 | 6.1573 | 5.7808 | 6.5764 | 6.20071 | 6.1789 | 6.2063 |
| PAGE4 | 7.78752 | 4.79959 | 8.60591 | 5.2044 | 5.1045 | 5.3075 | 7.20806 | 5.2471 | 7.3508 |
| STEAP4 | 8.12307 | 7.29677 | 8.41974 | 3.26122 | 3.2612 | 3.2423 | 10.4898 | 10.657 | 10.466 |
| TMEM178A | 7.314555 | 6.61022 | 7.5254 | 4.57785 | 4.5071 | 4.5939 | 8.681645 | 8.4749 | 8.7561 |
| CXCL2 | 9.261335 | 7.34194 | 10.048 | 9.24825 | 9.0011 | 9.4489 | 8.75985 | 7.2643 | 9.0269 |
| HS3SBA1 | 4.45439 | 2.69531 | 5.32664 | 4.82805 | 4.9046 | 4.6609 | 5.18552 | 4.3254 | 5.3928 |
| EYA1 | 6.07141 | 3.60874 | 6.91569 | 4.19606 | 4.1531 | 4.2517 | 5.809395 | 4.6238 | 5.9532 |
| RSPO2 | 3.84235 | 1.98492 | 5.30295 | 2.61807 | 2.5402 | 2.6731 | 2.76883 | 2.1794 | 2.9415 |
| PKP1 | 6.112415 | 5.26861 | 6.34026 | 4.61452 | 4.3254 | 4.7781 | 5.22822 | 4.7867 | 5.2662 |
| MUC6 | 6.01117 | 5.96861 | 6.05794 | 8.69215 | 8.7469 | 8.582 | 6.73111 | 6.5614 | 6.7738 |
| PENK | 4.0716 | 2.34573 | 6.28444 | 8.74017 | 8.8199 | 8.6943 | 2.810335 | 2.5609 | 2.8701 |
| DEFB1 | 7.25831 | 4.86935 | 8.44625 | 6.346 | 5.9395 | 6.5493 | 6.238925 | 3.5331 | 6.7243 |
| SLC7A3 | 4.517555 | 3.83265 | 5.12394 | 3.06899 | 2.9415 | 3.1712 | 5.131285 | 4.6388 | 5.2528 |
| MIR578 | 5.23268 | 4.15688 | 5.74198 | 3.60874 | 3.3985 | 3.7449 | 3.83251 | 3.0482 | 4.0207 |
| PI15 | 5.175905 | 3.18336 | 5.8754 | 9.11409 | 7.7045 | 9.9628 | 6.06872 | 4.8925 | 6.2305 |
| UBXN10-AS1 | 6.333035 | 3.50707 | 7.96714 | 5.06221 | 4.6847 | 5.2619 | 5.20983 | 3.7088 | 5.5369 |
| PDK4 | 3.907115 | 2.34383 | 5.47102 | 3.16997 | 3.2654 | 3.1022 | 4.05588 | 3.1565 | 4.2233 |
| PHGR1 | 4.83498 | 4.68471 | 4.91059 | 4.07399 | 4.074 | 4.068 | 7.31838 | 6.8104 | 7.4198 |
| SERPINE1 | 6.748165 | 5.89172 | 7.29677 | 4.57785 | 4.7107 | 4.3841 | 6.454425 | 5.8998 | 6.6472 |
| PDZRN4 | 5.065115 | 2.79653 | 6.28318 | 9.92587 | 10.04 | 9.8607 | 4.384745 | 2.7757 | 4.6154 |
| ZNF185 | 7.015235 | 5.24706 | 8.18067 | 5.24706 | 5.2471 | 5.2477 | 6.330095 | 5.767 | 6.3871 |
| ADRA2C | 7.300155 | 5.78671 | 7.99285 | 7.68072 | 7.7405 | 7.6252 | 6.58485 | 6.2063 | 6.6863 |
| AZGP1 | 8.64502 | 6.63277 | 9.1771 | 7.2166 | 6.5614 | 7.6067 | 8.821125 | 7.4957 | 9.031 |
| TK1 | 5.12958 | 6.43788 | 4.55892 | 7.33302 | 7.5376 | 7.2099 | 4.209675 | 4.4515 | 4.1974 |
| POTEH | 5.033025 | 4.68471 | 5.41636 | 3.49675 | 3.3158 | 3.6403 | 4.387175 | 4.3664 | 4.3872 |
| KIF11 | 3.77959 | 5.07156 | 3.16997 | 3.38809 | 3.5827 | 3.2756 | 3.0616 | 3.1386 | 3.0463 |
| CLDN1 | 5.175105 | 4.07399 | 5.69935 | 5.25653 | 5.0154 | 5.5078 | 4.69244 | 4.132 | 4.7867 |
| MIR4530 | 10.9443 | 9.2709 | 11.6184 | 11.1975 | 11.081 | 11.277 | 11.3313 | 10.086 | 11.504 |
| MAFF | 8.49114 | 7.27831 | 9.26613 | 6.22565 | 6.0525 | 6.3947 | 9.6093 | 8.8522 | 9.7909 |
| ZNF765 | 3.602255 | 3.31332 | 3.71212 | 4.82805 | 4.5185 | 5.0909 | 4.70517 | 4.3841 | 4.7675 |
| CKS2 | 6.468755 | 6.98567 | 6.19645 | 2.60809 | 2.7465 | 2.3706 | 4.020185 | 2.8152 | 4.2086 |
| TCEAL7 | 5.114575 | 3.29422 | 6.17888 | 5.42383 | 5.3301 | 5.5736 | 5.06191 | 2.9046 | 5.2486 |
| PLIN1 | 4.436085 | 5.08342 | 3.74916 | 3.48572 | 3.666 | 3.2654 | 3.456275 | 3.8327 | 3.3792 |
| SIGLEC1 | 5.176255 | 6.12635 | 4.81258 | 6.27516 | 6.4169 | 6.1338 | 5.02289 | 5.1045 | 5.0181 |
| FAM1508 | 7.000985 | 5.10447 | 8.07842 | 6.77336 | 6.8114 | 6.6669 | 5.69935 | 4.4515 | 5.8569 |
| MFAP5 | 4.10253 | 2.34383 | 5.57364 | 3.80478 | 3.7365 | 3.8325 | 4.97069 | 2.9415 | 5.2471 |
| SFRP1 | 8.42439 | 6.87325 | 8.84832 | 5.40862 | 5.4486 | 5.3868 | 9.00425 | 8.4318 | 9.0461 |
| DUSP5 | 6.049365 | 4.07026 | 6.89159 | 6.47079 | 6.5916 | 6.3697 | 3.380615 | 2.609 | 3.7498 |
| VARS2 | 5.144165 | 5.55841 | 4.68206 | 3.66826 | 3.4695 | 3.8069 | 3.710975 | 3.4595 | 3.7374 |
| ABCC4 | 5.20667 | 4.77776 | 5.43315 | 5.64272 | 5.0619 | 5.9743 | 6.13912 | 6.2684 | 6.1369 |
| SH3BP4 | 4.840135 | 4.25165 | 5.42961 | 4.57785 | 4.4515 | 4.6512 | 5.320995 | 4.8281 | 5.4599 |
| SORD | 9.140035 | 9.07048 | 9.15822 | 7.74808 | 7.2239 | 8.0572 | 8.33616 | 8.2458 | 8.3401 |
| MTERFD1 | 5.513935 | 6.02508 | 5.22508 | 4.51834 | 4.7242 | 4.3928 | 3.69208 | 3.7427 | 3.6104 |
| DPP4 | 4.75566 | 3.70312 | 5.57364 | 4.24098 | 4.3217 | 4.2055 | 6.243255 | 5.4332 | 6.3479 |
| #N/A | 4.890245 | 5.51612 | 4.48785 | 3.49859 | 3.3219 | 3.6486 | 3.538075 | 3.5905 | 3.5304 |
| FAM3B | 7.73412 | 7.02685 | 8.0087 | 4.82805 | 4.8423 | 4.8124 | 9.0795 | 7.7829 | 9.1889 |
| KLK3 | 10.63635 | 10.611 | 10.7045 | 10.6617 | 10.395 | 10.802 | 12.8215 | 12.822 | 12.822 |

[0085] In certain embodiments the methods described herein may comprise determining the expression level of at least one of the genes with a negative weight listed in Table 1 together with at least one gene with a positive weight listed in Table 1. Thus, the methods may rely upon a combination of an up-regulated marker and a down-regulated marker. The combined up and down regulated marker expression levels, as appropriately weighted, may then contribute to, or make up, the final signature score.

[0086] In certain embodiments the methods described herein comprise comparing the expression level of one or more genes to a reference value or to the expression level in one or more control samples or to the expression level in one or more control cells in the same sample. The control cells may be normal (i.e. cells characterised by an independent method as non-cancerous) cells. The one or more control samples may consist of non-cancerous cells or may include a mixture of cancer cells (prostate, ER positive breast or otherwise) and non-cancerous cells. The expression level may be compared to the expression level of the same gene in one or more control samples or control cells.

[0087] The reference value may be a threshold level of expression of at least one gene set by determining the level or levels in a range of samples from subjects with and without the relevant cancer. The cancer, such as prostate cancer or ER positive breast cancer may be cancer with and/or without an increased likelihood of recurrence and/or metastasis and/or a poor prognosis. Suitable methods for setting a threshold are well known to those skilled in the art. The threshold may be mathematically derived from a training set of patient data. The score threshold thus separates the test samples according to presence or absence of the particular condition. The interpretation of this quantity, i.e. the cut-off threshold may be derived in a development or training phase from a set of patients with known outcome. The threshold may therefore be fixed prior to performance of the claimed methods from training data by methods known to those skilled in the art and as detailed herein in relation to generation of the various gene signatures.

[0088] The reference value may also be a threshold level of expression of at least one gene set by determining the level of expression of the at least one gene in a sample from a subject at a first time point. The determined levels of expression at later time points for the same subject are then compared to the threshold level. Thus, the methods of the invention may be used in order to monitor progress of disease in a subject, namely to provide an ongoing characterization and/or prognosis of disease in the subject. For example, the methods may be used to identify (or “diagnose”) a cancer, such as prostate cancer or ER positive breast cancer that has developed into a more aggressive or potentially metastatic form. This may be used to guide treatment decisions as discussed in further detail herein. In some embodiments, such monitoring methods determine whether treatment should be administered or not. If the cancer is identified within the metastatic biology group the cancer should be treated. If the cancer is identified as “non-metastatic” further monitoring can be performed to ensure that the cancer remains stable (i.e. does not evolve into the metastatic form). In such circumstances, no further treatment may be applied.

[0089] For genes whose expression level does not differ between normal cells and cells from a cancer, such as prostate cancer or ER positive breast cancer that does not have an increased likelihood of recurrence and/or metastasis and/or a poor prognosis the expression level of the same gene in normal cells in the same sample can be used as a control.

[0090] Different may be statistically significantly different. By statistically significant is meant unlikely to have occurred by chance alone. A suitable statistical assessment may be performed according to any suitable method.

[0091] The methods described herein may further comprise determining the expression level of a reference gene. A reference gene may be required if the target gene expression level differs between normal cells and cells from a cancer, such as prostate cancer or ER positive breast cancer that does not have an increased likelihood of recurrence and/or metastasis and/or a poor prognosis.

[0092] In certain embodiments the expression level of at least one gene selected from Table 1 is compared to the expression level of a reference gene.

[0093] The reference gene may be any gene with minimal expression variance across all cancer, such as prostate cancer or ER positive breast cancer samples. Thus, the reference gene may be any gene whose expression level does not vary with likelihood of recurrence and/or metastasis and/or a poor prognosis. The skilled person is well able to identify a suitable reference gene based upon these criteria. The expression level of the reference gene may be determined in the same sample as the expression level of at least one gene selected from Table 1.

[0094] The expression level of the reference gene may be determined in a different sample. The different sample may be a control sample as described above. The expression level of the reference gene may be determined in normal cells and/or cancer, such as prostate cancer or ER positive breast cancer, cells in a sample.

[0095] The expression level of the at least one gene in the sample from the subject may be analysed using a statistical model. In specific embodiments where the expression level of at least 2 genes, up to all 70 genes from Table 1, is measured the genes may be weighted. As used herein, the term “weight” refers to the relative importance of an item in a statistical calculation. The weight of each gene may be determined on a data set of patient samples using analytical methods known in the art. An overall score, termed a “signature score”, may be calculated and used to provide a characterisation of and/or prognosis for the cancer, such as prostate cancer or ER positive breast cancer. Typically, the score represents the sum of the weighted gene expression levels. Suitable weights for calculating the 70 gene signature score are set forth in Table 1 and may be employed according to the methods of the invention. Similarly, suitable weights for exemplary smaller signatures are set forth in Tables 2 to 24.

[0096] Thus, according to all aspects of the invention, the methods may comprise:

[0097] (i) determining the expression level of at least one gene selected from Table 1 in a sample from the subject; and

[0098] (ii) assessing from the expression level of the at least one gene whether the sample from the subject is positive or negative for a gene signature comprising the at least one gene.

[0099] As discussed herein, if the sample is positive for the gene signature this identifies the cancer as of the high metastatic potential type. This may indicate a (relatively) poor prognosis, or any other pertinent associated characterisation, prognosis or diagnosis as described herein. By corollary, a sample negative for the gene signature identifies the cancer as not of the high metastatic potential type. This may indicate a (relatively) good prognosis, or any other pertinent associated characterisation, prognosis or diagnosis as described herein.

[0100] Thus, at its simplest, an increased level of expression of one or more genes defines a sample as positive for the gene signature. For certain genes, a decreased level of expression of one or more gene defines a sample as positive for the gene signature. However, where the expression level of a plurality of genes is measured, the combination of expression levels is typically aggregated in order to determine whether the sample is positive for the gene signature. Thus, some genes may display increased expression and some genes may display decreased expression. This can be achieved in various ways, as discussed in detail herein.

[0101] In specific embodiments, the signature score may be calculated according to the following equation:

$$Signature Score = {\sum }_{i} {w}_{i} \times ( g {e}_{i} - {b}_{i} ) + k$$

[0102] Where wᵢ is a weight for each gene, bᵢ is a gene-specific bias, geᵢ is the gene expression after pre-processing, and k is a constant offset.

[0103] Similarly, each gene in the signature may be attributed a bias score. Example bias scores for the 70 gene signature are specified in table 1 and may be adopted according to the performance of the methods of the invention. Of course, where different signatures are utilised, representing a subset of the 70 gene signature, the bias values would be recalculated. Examples are provided in Tables 2 to 24.

[0104] As indicated, k is a constant offset. Where the bias and weight values of table 1 are adopted for the 70 gene signature, the constant offset may have a value of 0.4365. Again, where different signatures are utilised, representing a subset of the 70 gene signature, the value of k would be recalculated. The value of k varies dependent upon where the threshold for “signature positive” is set. This threshold may be set dependent upon which considerations are most important, e.g. to maximize sensitivity and/or specificity as against a particular outcome or characterisation. Suitable thresholds may be determined as described above.

[0105] In some embodiments, a score above the threshold may indicate a poor prognosis (or other pertinent characterisation, prognosis or diagnosis as described herein). In those embodiments, a score equal to or below threshold may indicate a good prognosis. In other embodiments, a score above or equal to the threshold may indicate a poor prognosis (or other pertinent characterisation, prognosis or diagnosis as described herein). In those embodiments, a score below threshold may indicate a good prognosis. The skilled person would also appreciate that a simple mathematical transformation could be used to invert the score and “above” and “below” should be construed accordingly unless indicated otherwise.

[0106] By “signature score” is meant a compound decision score that summarizes the expression levels of the genes. This may be compared to a threshold score that is mathematically derived from a training set of patient data. The threshold score is established with the purpose of maximizing the ability to separate cancers into those that are positive for the biomarker signature and those that are negative. The patient training set data is preferably derived from cancer tissue samples having been characterized by sub-type, prognosis, likelihood of recurrence, long term survival, clinical outcome, treatment response, diagnosis, cancer classification, or personalized genomics profile. Expression profiles, and corresponding decision scores from patient samples may be correlated with the characteristics of patient samples in the training set that are on the same side of the mathematically derived score decision threshold. In certain example embodiments, the threshold of the (linear) classifier scalar output is optimized to maximize the sum of sensitivity and specificity under cross-validation as observed within the training dataset.

[0107] The overall expression data for a given sample may be normalized using methods known to those skilled in the art in order to correct for differing amounts of starting material, varying efficiencies of the extraction and amplification reactions, etc.

[0108] In one embodiment, the biomarker expression levels in a sample are evaluated by a (linear) classifier. As used herein, a (linear) classifier refers to a weighted sum of the individual biomarker intensities into a compound decision score (“decision function”). The decision score is then compared to a pre-defined cut-off score threshold, corresponding to a certain set-point in terms of sensitivity and specificity which indicates if a sample is equal to or above the score threshold (decision function positive) or below (decision function negative).

[0109] Using a (linear) classifier on the normalized data to make a call (e.g. positive or negative for a biomarker signature) effectively means to split the data space, i.e. all possible combinations of expression values for all genes in the classifier, into two disjoint segments by means of a separating hyperplane. This split is empirically derived on a (large) set of training examples. Without loss of generality, one can assume a certain fixed set of values for all but one biomarker, which would automatically define a threshold value for this remaining biomarker where the decision would change from, for example, positive or negative for the biomarker signature. The precise value of this threshold depends on the actual measured expression profile of all other genes within the classifier, but the general indication of certain genes remains fixed. Therefore, in the context of the overall gene expression classifier, relative expression can indicate if either up- or down-regulation of a certain biomarker is indicative of being positive for the signature or not. In certain example embodiments, a sample expression score above the threshold expression score indicates the sample is positive for the biomarker signature. In certain other example embodiments, a sample expression score above a threshold score indicates the subject has a poor clinical prognosis compared to a subject with a sample expression score below the threshold score.

[0110] In certain other example embodiments, the expression signature is derived using a decision tree (Hastie et al. The Elements of Statistical Learning, Springer, New York 2001), a random forest (Breiman, 2001 Random Forests, Machine Learning 45:5), a neural network (Bishop, Neural Networks for Pattern Recognition, Clarendon Press, Oxford 1995), discriminant analysis (Duda et al. Pattern Classification, 2nd ed., John Wiley, New York 2001), including, but not limited to linear, diagonal linear, quadratic and logistic discriminant analysis, a Prediction Analysis for Microarrays (PAM, (Tibshirani et al., 2002, Proc. Natl. Acad. Sci. USA 99:6567-6572)) or a Soft Independent Modeling of Class Analogy analysis. (SIMCA, (Wold, 1976, Pattern Recogn. 8:127-139)). Classification trees (Breiman, Leo; Friedman, J. H.; Olshen, R. A.; Stone, C. J. (1984). Classification and regression trees. Monterey, Calif.: Wadsworth & Brooks/Cole Advanced Books & Software. ISBN 978-0-412-04841-8) provide a means of predicting outcomes based on logic and rules. A classification tree is built through a process called binary recursive partitioning, which is an iterative procedure of splitting the data into partitions/branches. The goal is to build a tree that distinguishes among pre-defined classes. Each node in the tree corresponds to a variable. To choose the best split at a node, each variable is considered in turn, where every possible split is tried and considered, and the best split is the one which produces the largest decrease in diversity of the classification label within each partition. This is repeated for all variables, and the winner is chosen as the best splitter for that node. The process is continued at the next node and in this manner, a full tree is generated. One of the advantages of classification trees over other supervised learning approaches such as discriminant analysis, is that the variables that are used to build the tree can be either categorical, or numeric, or a mix of both. In this way it is possible to generate a classification tree for predicting outcomes based on say the directionality of gene expression.

[0111] Random forest algorithms (Breiman, Leo (2001). “Random Forests”. Machine Learning 45 (1): 5-32. doi:10.1023/A:1010933404324) provide a further extension to classification trees, whereby a collection of classification trees are randomly generated to form a “forest” and an average of the predicted outcomes from each tree is used to make inference with respect to the outcome.

[0112] Biomarker expression values may be defined in combination with corresponding scalar weights on the real scale with varying magnitude, which are further combined through linear or non-linear, algebraic, trigonometric or correlative means into a single scalar value via an algebraic, statistical learning, Bayesian, regression, or similar algorithms which together with a mathematically derived decision function on the scalar value provide a predictive model by which expression profiles from samples may be resolved into discrete classes of responder or non-responder, resistant or non-resistant, to a specified drug, drug class, molecular subtype, or treatment regimen. Such predictive models, including biomarker membership, are developed by learning weights and the decision threshold, optimized for sensitivity, specificity, negative and positive predictive values, hazard ratio or any combination thereof, under cross-validation, bootstrapping or similar sampling techniques, from a set of representative expression profiles from historical patient samples with known drug response and/or resistance.

[0113] In one embodiment, the genes are used to form a weighted sum of their signals, where individual weights can be positive or negative. The resulting sum (“expression score”) is compared with a pre-determined reference point or value. The comparison with the reference point or value may be used to diagnose, or predict a clinical condition or outcome.

[0114] As described above, one of ordinary skill in the art will appreciate that the genes included in the classifier provided in the various Tables will carry unequal weights in a classifier. Therefore, while as few as one biomarker may be used to diagnose or predict a clinical prognosis or response to a therapeutic agent, the specificity and sensitivity or diagnosis or prediction accuracy may increase using more genes.

[0115] In certain example embodiments, the expression signature is defined by a decision function. A decision function is a set of weighted expression values derived using a (linear) classifier.

[0116] All linear classifiers define the decision function using the following equation:

f(x)=w′·x+b=Σwi·xi+b (1)

[0117] All measurement values, such as the microarray gene expression intensities xi, for a certain sample are collected in a vector x. Each intensity is then multiplied with a corresponding weight wi to obtain the value of the decision function f(x) after adding an offset term b. In deriving the decision function, the linear classifier will further define a threshold value that splits the gene expression data space into two disjoint sections. Example (linear) classifiers include but are not limited to partial least squares (PLS), (Nguyen et al., Bioinformatics 18 (2002) 39-50), support vector machines (SVM) (Schölkopf et al., Learning with Kernels, MIT Press, Cambridge 2002), and shrinkage discriminant analysis (SDA) (Ahdesmaki et al., Annals of applied statistics 4, 503-519 (2010)). In one example embodiment, the (linear) classifier is a PLS linear classifier.

[0118] The decision function is empirically derived on a large set of training samples, for example from patients showing a good or poor clinical prognosis. The threshold separates a patient group based on different characteristics such as, but not limited to, clinical prognosis before or after a given therapeutic treatment. The interpretation of this quantity, i.e. the cut-off threshold, is derived in the development phase (“training”) from a set of patients with known outcome. The corresponding weights and the responsiveness/resistance cut-off threshold for the decision score are fixed a priori from training data by methods known to those skilled in the art. In one example embodiment, Partial Least Squares Discriminant Analysis (PLS-DA) is used for determining the weights. (L. Ståhle, S. Wold, J. Chemom. 1 (1987) 185-196; D. V. Nguyen, D. M. Rocke, Bioinformatics 18 (2002) 39-50).

[0119] Effectively, this means that the data space, i.e. the set of all possible combinations of biomarker expression values, is split into two mutually exclusive groups corresponding to different clinical classifications or predictions, for example, one corresponding to good clinical prognosis and poor clinical prognosis. In the context of the overall classifier, relative over-expression of a certain biomarker can either increase the decision score (positive weight) or reduce it (negative weight) and thus contribute to an overall decision of, for example, a good clinical prognosis.

[0120] In certain example embodiments of the invention, the data is transformed non-linearly before applying a weighted sum as described above. This non-linear transformation might include increasing the dimensionality of the data. The non-linear transformation and weighted summation might also be performed implicitly, for example, through the use of a kernel function. (Schölkopf et al. Learning with Kernels, MIT Press, Cambridge 2002).

[0121] In certain example embodiments, the patient training set data is derived by isolated RNA from a corresponding cancer tissue sample set and determining expression values by hybridizing the (cDNA amplified from) isolated RNA to a microarray. In certain example embodiments, the microarray used in deriving the expression signature is a transcriptome array. As used herein a “transcriptome array” refers to a microarray containing probe sets that are designed to hybridize to sequences that have been verified as expressed in the diseased tissue of interest. Given alternative splicing and variable poly-A tail processing between tissues and biological contexts, it is possible that probes designed against the same gene sequence derived from another tissue source or biological context will not effectively bind to transcripts expressed in the diseased tissue of interest, leading to a loss of potentially relevant biological information. Accordingly, it is beneficial to verify what sequences are expressed in the disease tissue of interest before deriving a microarray probe set. Verification of expressed sequences in a particular disease context may be done, for example, by isolating and sequencing total RNA from a diseased tissue sample set and cross-referencing the isolated sequences with known nucleic acid sequence databases to verify that the probe set on the transcriptome array is designed against the sequences actually expressed in the diseased tissue of interest. Methods for making transcriptome arrays are described in United States Patent Application Publication No. 2006/0134663, which is incorporated herein by reference. In certain example embodiments, the probe set of the transcriptome array is designed to bind within 300 nucleotides of the 3′ end of a transcript. Methods for designing transcriptome arrays with probe sets that bind within 300 nucleotides of the 3′ end of target transcripts are disclosed in United States Patent Application Publication No. 2009/0082218, which is incorporated by reference herein. In certain example embodiments, the microarray used in deriving the gene expression profiles of the present invention is the Almac Prostate Cancer DSA™ microarray (Almac Group, Craigavon, United Kingdom).

[0122] An optimal (linear) classifier can be selected by evaluating a (linear) classifier's performance using such diagnostics as “area under the curve” (AUC). AUC refers to the area under the curve of a receiver operating characteristic (ROC) curve, both of which are well known in the art. AUC measures are useful for comparing the accuracy of a classifier across the complete data range. (Linear) classifiers with a higher AUC have a greater capacity to classify unknowns correctly between two groups of interest (e.g., ovarian cancer samples and normal or control samples). ROC curves are useful for plotting the performance of a particular feature (e.g., any of the genes described herein and/or any item of additional biomedical information) in distinguishing between two populations (e.g., individuals responding and not responding to a therapeutic agent). Typically, the feature data across the entire population (e.g., the cases and controls) are sorted in ascending order based on the value of a single feature. Then, for each value for that feature, the true positive and false positive rates for the data are calculated. The true positive rate is determined by counting the number of cases above the value for that feature and then dividing by the total number of positive cases. The false positive rate is determined by counting the number of controls above the value for that feature and then dividing by the total number of controls. Although this definition refers to scenarios in which a feature is elevated in cases compared to controls, this definition also applies to scenarios in which a feature is lower in cases compared to the controls (in such a scenario, samples below the value for that feature would be counted). ROC curves can be generated for a single feature as well as for other single outputs, for example, a combination of two or more features can be mathematically combined (e.g., added, subtracted, multiplied, etc.) to provide a single sum value, and this single sum value can be plotted in a ROC curve. Additionally, any combination of multiple features, in which the combination derives a single output value, can be plotted in a ROC curve. These combinations of features may comprise a test. The ROC curve is the plot of the true positive rate (sensitivity) of a test against the false positive rate (1-specificity) of the test.

[0123] Alternatively, an optimal classifier can be selected by evaluating performance against time-to-event endpoints using methods such as Cox proportional hazards (PH) and measures of performance across all possible thresholds assessed via the concordance-index (C-index) (Harrell, Jr. 2010). The C-Index is analagous to the “area under the curve” (AUC) metric (used for dichotomised endpoints), and it is used to measure performance with respect to association with survival data. Note that the extension of AUC to time-to-event endpoints is the C-index, with threshold selection optimised to maximise the hazard ratio (HR) under cross-validation. In this instance, the partial Cox regression algorithm (Li and Gui, 2004) was chosen for the biomarker discovery analyses. It is analogous to principal components analysis in that the first few latent components explain most of the information in the data. Implementation is as described in Ahdesmaki et al 2013.

[0124] C-index values can be generated for a single feature as well as for other single outputs, for example, a combination of two or more features can be mathematically combined (e.g., added, subtracted, multiplied, etc.) to provide a single sum value, and this single sum value can be evaluated for statistical significance. Additionally, any combination of multiple features, in which the combination derives a single output value, can be evaluated as a C-index for assessing utility for time-to-event class separation. These combinations of features may comprise a test. The C-index (Harrell, Jr. 2010, see Equation 4) of the continuous cross-validation test set risk score predictions was evaluated as the main performance measure.

[0125] Methods for determining the expression levels of the at least one gene from Table 1 (biomarkers) are described in greater detail herein. Typically, the methods may involve contacting a sample obtained from a subject with a detection agent, such as primers and/or probes, or an antibody or functionally equivalent binding reagent, (as discussed in detail herein) specific for the gene and detecting expression products. The detection agent may be labelled as discussed herein. A comparison may be made against expression levels determined in a control sample to provide a characterization and/or a prognosis for the cancer, such as prostate cancer or ER positive breast cancer.

[0126] According to all aspects of the invention the expression level of the gene or genes may be measured by any suitable method. In certain embodiments the expression level is determined at the level of protein, RNA or epigenetic modification. The epigenetic modification may be DNA methylation.

[0127] The expression level of any of the genes described herein may be detected by detecting the appropriate RNA. The assays may investigate specific regions of the genes, as described herein. For example, the assays may investigate the regions flanked by specific primer binding sites and/or regions of the gene to which the probe sets described herein hybridize. The assays may investigate, promoter, terminator, exonic and/or intronic regions of the genes as appropriate. The assays may investigate one or more of the full sequences or target sequences, or regions thereof, as specified in Table 1 for the respective genes.

[0128] In certain embodiments, according to all aspects of the invention, expression of the at least one gene may be determined using one or more probes or primers (primer pairs) designed to hybridize with one or more of the target sequences or full sequences listed in Table 1. The probes and probesets identified in table 1 (and detailed further in Table 1A) may be employed according to all aspects of the invention. The primers and primer pairs listed in Table 1B and identified as SEQ ID NOs 3151-3154 may be employed according to all aspects of the invention.

[0129] Accordingly, in specific embodiments the expression level is determined by microarray, northern blotting, RNA-seq (RNA sequencing), in situ RNA detection or nucleic acid amplification. Nucleic acid amplification includes PCR and all variants thereof such as real-time and end point methods and quantitative PCR (qPCR). Other nucleic acid amplification techniques are well known in the art, and include methods such as NASBA, 3SR and Transcription Mediated Amplification (TMA). Other suitable amplification methods include the ligase chain reaction (LCR), selective amplification of target polynucleotide sequences (U.S. Pat. No. 6,410,276), consensus sequence primed polymerase chain reaction (U.S. Pat. No. 4,437,975), arbitrarily primed polymerase chain reaction (WO 90/06995), invader technology, strand displacement technology, and nick displacement amplification (WO 2004/067726). This list is not intended to be exhaustive; any nucleic acid amplification technique may be used provided the appropriate nucleic acid product is specifically amplified. Design of suitable primers and/or probes is within the capability of one skilled in the art. Various primer design tools are freely available to assist in this process such as the NCBI Primer-BLAST tool. Primers and/or probes may be at least 15, 16, 17, 18, 19, 20, 21, 22, 23, 24 or 25 (or more) nucleotides in length. mRNA expression levels may be measured by reverse transcription quantitative polymerase chain reaction (RT-PCR followed with qPCR). RT-PCR is used to create a cDNA from the mRNA. The cDNA may be used in a qPCR assay to produce fluorescence as the DNA amplification process progresses. By comparison to a standard curve, qPCR can produce an absolute measurement such as number of copies of mRNA per cell. Northern blots, microarrays, Invader assays, and RT-PCR combined with capillary electrophoresis have all been used to measure expression levels of mRNA in a sample. See Gene Expression Profiling: Methods and Protocols, Richard A. Shimkets, editor, Humana Press, 2004. Many detection technologies are well known and commercially available, such as TAQMAN®, MOLECULAR BEACONS®, AMPLIFLUOR® and SCORPION®, DzyNA®, Plexor™ etc.

[0130] Suitable amplification assays (PCR or qPCR) have been designed by the inventors and are described in further detail in Table 1B. The forward and reverse primers listed therein for each gene may be utilized according to all aspects of the invention. Similarly, the primers of SEQ ID NOs 3151-3154 may be used to amplify MIR578 and MIR4530 respectively.

[0131] RNA-seq uses next-generation sequencing to measure changes in gene expression. RNA may be converted into cDNA or directly sequenced. Next generation sequencing techniques include pyrosequencing, SOLiD sequencing, Ion Torrent semiconductor sequencing, Illumina dye sequencing, single-molecule real-time sequencing or DNA nanoball sequencing. RNA-seq allows quantitation of gene expression levels.

[0132] In situ RNA detection involves detecting RNA without extraction from tissues and cells. In situ RNA detection includes in situ hybridization (ISH) which uses a labeled (e.g. radio labelled, antigen labelled or fluorescence labelled) probe (complementary DNA or RNA strand) to localize a specific RNA sequence in a portion or section of tissue, or in the entire tissue (whole mount ISH), or in cells. The probe labeled with either radio-, fluorescent- or antigen-labeled bases (e.g., digoxigenin) may be localized and quantified in the tissue using either autoradiography, fluorescence microscopy or immunohistochemistry, respectively. ISH can also use two or more probes to simultaneously detect two or more transcripts. A branched DNA assay can also be used for RNA in situ hybridization assays with single molecule sensitivity. This approach includes ViewRNA assays. Samples (cells, tissues) are fixed, then treated to allow RNA target accessibility (RNA un-masking). Target-specific probes hybridize to each target RNA. Subsequent signal amplification is predicated on specific hybridization of adjacent probes (individual oligonucleotides that bind side by side on RNA targets). A typical target-specific probe will contain 40 oligonucleotides. Signal amplification is achieved via a series of sequential hybridization steps. A pre-amplifier molecule hybridizes to each oligo pair on the target-specific RNA, then multiple amplifier molecules hybridize to each pre-amplifier. Next, multiple label probe oligonucleotides (conjugated to an enzyme such as alkaline phosphatase or directly to fluorophores) hybridize to each amplifier molecule. Separate but compatible signal amplification systems enable multiplex assays. The signal can be visualized by measuring fluorescence or light emitted depending upon the detection system employed. Detection may involve using a high content imaging system, or a fluorescence or brightfield microscope in some embodiments.

[0133] Thus, in a further aspect the present invention relates to use of the kit for characterising and/or prognosing cancer, such as prostate cancer or ER positive breast cancer. The kit for (in situ) characterising and/or prognosing prostate cancer in a subject may comprise one or more oligonucleotide probes specific for an RNA product of at least one gene selected from Table 1. Suitable probes and probesets for each gene are listed in Table 1 and may be incorporated in the kits of the invention. The probes and probesets also constitute separate aspects of the invention. By “probeset” is meant the collection of probes designed to target (by hybridization) a single gene. The groupings are apparent from table 1 (and Table 1A).

[0134] The kit may further comprise one or more of the following components:
[0135] a) A blocking probe
[0136] b) A PreAmplifier
[0137] c) An Amplifier and/or
[0138] d) A Label molecule

[0139] The components of the kit may be suitable for conducting a viewRNA assay (https://www.panomics.com/products/rna-in-situ-analysis/view-rna-overview).

[0140] The components of the kit may be nucleic acid based molecules, optionally DNA (or RNA). The blocking probe is a molecule that acts to reduce background signal by binding to sites on the target not bound by the target specific probes (probes specific for the RNA product of the at least one gene of the invention). The PreAmplifier is a molecule capable of binding to a (a pair of) target specific probe(s) when target bound. The Amplifier is a molecule capable of binding to the PreAmplifier. Alternatively, the Amplifier may be capable of binding directly to a (a pair of) target specific probe(s) when target bound. The Amplifier has binding sites for multiple label molecules (which may be label probes).

[0141] RNA expression may be determined by hybridization of RNA to a set of probes. The probes may be arranged in an array. Microarray platforms include those manufactured by companies such as Affymetrix, Illumina and Agilent. Examples of microarray platforms manufactured by Affymetrix include the U133 Plus2 array, the Almac proprietary Xcel™ array and the Almac proprietary Cancer DSAs®, including the Prostate Cancer DSA®.

[0142] In specific embodiments, according to all aspects of the invention, expression of the at least one gene may be determined using one or more probes selected from those listed in Table 1.

[0143] In certain embodiments, according to all aspects of the invention, expression of the at least one gene may be determined using one or more probes or primers designed to hybridize with the target sequences or full sequences listed in Table 1.

[0144] These probes may also be incorporated into the kits of the invention. The probe sequences may also be used in order to design primers for detection of expression, for example by RT-PCR. Such primers may also be included in the kits of the invention. Suitable primers are listed in Table 1B and SEQ ID NOs 3151-3154.

[0145] The corresponding target sequences are listed in Table 1 below for the relevant probesets. The invention may involve use of different probes that target any one or more of these target sequences.

[0146] Similarly, the full gene sequences are listed in Table 1 for the relevant probesets. The invention may involve use of different probes that target any one or more of these full gene sequences as target sequences.

[0147] Increased rates of DNA methylation at or near promoters have been shown to correlate with reduced gene expression levels. DNA methylation is the main epigenetic modification in humans. It is a chemical modification of DNA performed by enzymes called methyltransferases, in which a methyl group (m) is added to specific cytosine (C) residues in DNA. In mammals, methylation occurs only at cytosine residues adjacent to a guanosine residue, i.e. at the sequence CG or at the CpG dinucleotide.

[0148] Accordingly, in yet a further aspect, the present invention relates to a method for characterising and/or prognosing cancer, such as prostate cancer or ER positive breast cancer in a subject comprising:

[0149] determining the methylation status of at least one gene selected from Table 1 in a sample from the subject wherein the determined methylation status is used to provide a characterisation of and/or a prognosis for the cancer, such as prostate cancer or ER positive breast cancer.

[0150] Methylation typically results in a down regulation of gene expression. Thus, methylation (which may be hypermethylation) of the genes with a negative weighting in table 1 may be determined according to some embodiments in order to indicate a poor prognosis (or related outcome as described herein). Additionally or alternatively, a lack of methylation (which may be hypomethylation) of the genes with a positive weighting in table 1 may be determined according to some embodiments in order to indicate a poor prognosis (or related outcome as described herein).

[0151] Determination of the methylation status may be achieved through any suitable means. Suitable examples include bisulphite genomic sequencing and/or by methylation specific PCR. Various techniques for assessing methylation status are known in the art and can be used in conjunction with the present invention: sequencing (including NGS), methylation-specific PCR (MS-PCR), melting curve methylation-specific PCR (McMS-PCR), MLPA with or without bisulphite treatment, QAMA (Zeschnigk et al, 2004), MSRE-PCR (Melnikov et al, 2005), MethyLight (Eads et al., 2000), ConLight-MSP (Rand et al., 2002), bisulphite conversion-specific methylation-specific PCR (BS-MSP)(Sasaki et al., 2003), COBRA (which relies upon use of restriction enzymes to reveal methylation dependent sequence differences in PCR products of sodium bisulphite—treated DNA), methylation-sensitive single-nucleotide primer extension conformation (MS-SNuPE), methylation-sensitive single-strand conformation analysis (MS-SSCA), Melting curve combined bisulphite restriction analysis (McCOBRA)(Akey et al., 2002), PyroMethA, HeavyMethyl (Cottrell et al. 2004), MALDI-TOF, MassARRAY, Quantitative analysis of methylated alleles (QAMA), enzymatic regional methylation assay (ERMA), QBSUPT, MethylQuant, Quantitative PCR sequencing and oligonucleotide-based microarray systems, Pyrosequencing, Meth-DOP-PCR. A review of some useful techniques for DNA methylation analysis is provided in Nucleic acids research, 1998, Vol. 26, No. 10, 2255-2264, Nature Reviews, 2003, Vol. 3, 253-266; Oral Oncology, 2006, Vol. 42, 5-13.

[0152] Techniques for assessing methylation status are based on distinct approaches. Some include use of endonucleases. Such endonucleases may either preferentially cleave methylated recognition sites relative to non-methylated recognition sites or preferentially cleave non-methylated relative to methylated recognition sites. Some examples of the former are Acc III, Ban I, BstN I, Msp I, and Xma I. Examples of the latter are Acc II, Ava I, BssH II, BstU I, Hpa II, and Not I. Differences in cleavage pattern are indicative for the presence or absence of a methylated CpG dinucleotide. Cleavage patterns can be detected directly, or after a further reaction which creates products which are easily distinguishable. Means which detect altered size and/or charge can be used to detect modified products, including but not limited to electrophoresis, chromatography, and mass spectrometry.

[0153] Alternatively, the identification of methylated CpG dinucleotides may utilize the ability of the methyl binding domain (MBD) of the MeCP2 protein to selectively bind to methylated DNA sequences (Cross et al, 1994; Shiraishi et al, 1999). The MBD may also be obtained from MBP, MBP2, MBP4, poly-MBD (Jorgensen et al., 2006) or from reagents such as antibodies binding to methylated nucleic acid. The MBD may be immobilized to a solid matrix and used for preparative column chromatography to isolate highly methylated DNA sequences. Variant forms such as expressed His-tagged methyl-CpG binding domain may be used to selectively bind to methylated DNA sequences. Eventually, restriction endonuclease digested genomic DNA is contacted with expressed His-tagged methyl-CpG binding domain. Other methods are well known in the art and include amongst others methylated-CpG island recovery assay (MIRA). Another method, MB-PCR, uses a recombinant, bivalent methyl-CpG-binding polypeptide immobilized on the walls of a PCR vessel to capture methylated DNA and the subsequent detection of bound methylated DNA by PCR.

[0154] Further approaches for detecting methylated CpG dinucleotide motifs use chemical reagents that selectively modify either the methylated or non-methylated form of CpG dinucleotide motifs. Suitable chemical reagents include hydrazine and bisulphite ions. The methods of the invention may use bisulphite ions, in certain embodiments. The bisulphite conversion relies on treatment of DNA samples with sodium bisulphite which converts unmethylated cytosine to uracil, while methylated cytosines are maintained (Furuichi et al., 1970). This conversion finally results in a change in the sequence of the original DNA. It is general knowledge that the resulting uracil has the base pairing behaviour of thymidine which differs from cytosine base pairing behaviour. This makes the discrimination between methylated and non-methylated cytosines possible. Useful conventional techniques of molecular biology and nucleic acid chemistry for assessing sequence differences are well known in the art and explained in the literature. See, for example, Sambrook, J., et al., Molecular cloning: A laboratory Manual, (2001) 3rd edition, Cold Spring Harbor, N.Y.; Gait, M. J. (ed.), Oligonucleotide Synthesis, A Practical Approach, IRL Press (1984); Hames B. D., and Higgins, S. J. (eds.), Nucleic Acid Hybridization, A Practical Approach, IRL Press (1985); and the series, Methods in Enzymology, Academic Press, Inc.

[0155] Some techniques use primers for assessing the methylation status at CpG dinucleotides. Two approaches to primer design are possible. Firstly, primers may be designed that themselves do not cover any potential sites of DNA methylation. Sequence variations at sites of differential methylation are located between the two primers and visualisation of the sequence variation requires further assay steps. Such primers are used in bisulphite genomic sequencing, COBRA, Ms-SnuPE and several other techniques. Secondly, primers may be designed that hybridize specifically with either the methylated or unmethylated version of the initial treated sequence. After hybridization, an amplification reaction can be performed and amplification products assayed using any detection system known in the art. The presence of an amplification product indicates that a sample hybridized to the primer. The specificity of the primer indicates whether the DNA had been modified or not, which in turn indicates whether the DNA had been methylated or not. If there is a sufficient region of complementarity, e.g., 12, 15, 18, or 20 nucleotides, to the target, then the primer may also contain additional nucleotide residues that do not interfere with hybridization but may be useful for other manipulations. Examples of such other residues may be sites for restriction endonuclease cleavage, for ligand binding or for factor binding or linkers or repeats. The oligonucleotide primers may or may not be such that they are specific for modified methylated residues.

[0156] A further way to distinguish between modified and unmodified nucleic acid is to use oligonucleotide probes. Such probes may hybridize directly to modified nucleic acid or to further products of modified nucleic acid, such as products obtained by amplification. Probe-based assays exploit the oligonucleotide hybridisation to specific sequences and subsequent detection of the hybrid. There may also be further purification steps before the amplification product is detected e.g. a precipitation step. Oligonucleotide probes may be labeled using any detection system known in the art. These include but are not limited to fluorescent moieties, radioisotope labeled moieties, bioluminescent moieties, luminescent moieties, chemiluminescent moieties, enzymes, substrates, receptors, or ligands.

[0157] In the MSP approach, DNA may be amplified using primer pairs designed to distinguish methylated from unmethylated DNA by taking advantage of sequence differences as a result of sodium-bisulphite treatment (WO 97/46705). For example, bisulphite ions modify non-methylated cytosine bases, changing them to uracil bases. Uracil bases hybridize to adenine bases under hybridization conditions. Thus an oligonucleotide primer which comprises adenine bases in place of guanine bases would hybridize to the bisulphite-modified DNA, whereas an oligonucleotide primer containing the guanine bases would hybridize to the non-modified (methylated) cytosine residues in the DNA. Amplification using a DNA polymerase and a second primer yield amplification products which can be readily observed, which in turn indicates whether the DNA had been methylated or not. Whereas PCR is a preferred amplification method, variants on this basic technique such as nested PCR and multiplex PCR are also included within the scope of the invention.

[0158] As mentioned earlier, one embodiment for assessing the methylation status of the relevant gene requires amplification to yield amplification products. The presence of amplification products may be assessed directly using methods well known in the art, and the ensuing discussion also applies to all other amplification embodiments as described herein. They simply may be visualized on a suitable gel, such as an agarose or polyacrylamide gel. Detection may involve the binding of specific dyes, such as ethidium bromide, which intercalate into double-stranded DNA and visualisation of the DNA bands under a UV illuminator for example. Another means for detecting amplification products comprises hybridization with oligonucleotide probes. Alternatively, fluorescence or energy transfer can be measured to determine the presence of the methylated DNA.

[0159] A specific example of the MSP technique is designated real-time quantitative MSP (QMSP), and permits reliable quantification of methylated DNA in real time or at end point. Real-time methods are generally based on the continuous optical monitoring of an amplification procedure and utilise fluorescently labelled reagents whose incorporation in a product can be quantified and whose quantification is indicative of copy number of that sequence in the template. One such reagent is a fluorescent dye, called SYBR Green I that preferentially binds double-stranded DNA and whose fluorescence is greatly enhanced by binding of double-stranded DNA. Alternatively, labelled primers and/or labelled probes can be used for quantification. They represent a specific application of the well-known and commercially available real-time amplification techniques such as TAQMAN®, MOLECULAR BEACONS®, AMPLIFLUOR® and SCORPION®, DzyNA®, Plexor™ etc. In the real-time PCR systems, it is possible to monitor the PCR reaction during the exponential phase where the first significant increase in the amount of PCR product correlates to the initial amount of target template.

[0160] Real-Time PCR detects the accumulation of amplicon during the reaction. Real-time methods do not need to be utilised, however. Many applications do not require quantification and Real-Time PCR is used only as a tool to obtain convenient results presentation and storage, and at the same time to avoid post-PCR handling. Thus, analyses can be performed only to confirm whether the target DNA is present in the sample or not. Such end-point verification is carried out after the amplification reaction has finished.

[0161] The expression level of one or more genes from Table 1 may be determined by immunohistochemistry. By Immunohistochemistry is meant the detection of proteins in cells of a tissue sample by using a binding reagent such as an antibody or aptamer that binds specifically to the proteins. Thus, the expression level as determined by immunohistochemistry is a protein level. The sample may be a tissue sample and may comprise cancer (tumour) cells, normal tissue cells and, optionally, infiltrating immune cells. In embodiments applicable to prostate cancer, the sample may be a prostate tissue sample and may comprise prostate cancer (tumour) cells, prostatic intraepithelial neoplasia (PIN) cells, normal prostate epithelium, stroma and, optionally, infiltrating immune cells. In some embodiments the expression level of the at least one gene in the cancer (tumour) cells in a sample is compared to the expression level of the same gene (and/or a reference gene) in the normal cells in the same sample. In some embodiments the expression level of the at least one gene in the cancer (tumour) cells in a sample is compared to the expression level of the same gene (and/or a reference gene) in the normal cells in a control sample. The normal cells may comprise, consist essentially of or consist of normal (non-cancer) epithelial cells. In certain embodiments the normal cells do not comprise PIN cells and/or stroma cells. In certain embodiments the prostate cancer (tumour) cells do not comprise PIN cells and/or stroma cells. In further embodiments the expression level of the at least one gene in the prostate cancer (tumour) cells in a sample is (additionally) compared to the expression level of a reference gene in the same cells or in the prostate cancer cells in a control sample. In yet further embodiments the expression level of the at least one gene in the cancer (tumour) cells in a sample is scored using a method based on intensity, proportion and/or localisation of expression in the cancer (tumour) cells (without comparison to normal cells). The scoring method may be derived in a development or training phase from a set of patients with known outcome.

[0162] Accordingly, in a further aspect, the present invention relates to an antibody or aptamer that binds specifically to a protein product of at least one gene selected from Table 1. The epitope to which the antibody or aptomer binds may be derived from the amino acid sequences corresponding to the full sequences or target sequences identified in Table 1.

[0163] The antibody may be of monoclonal or polyclonal origin. Fragments and derivative antibodies may also be utilised, to include without limitation Fab fragments, ScFv, single domain antibodies, nanoantibodies, heavy chain antibodies, aptamers etc. which retain peptide-specific binding function and these are included in the definition of “antibody”. Such antibodies are useful in the methods of the invention. They may be used to measure the level of a particular protein, or in some instances one or more specific isoforms of a protein. The skilled person is well able to identify epitopes that permit specific isoforms to be discriminated from one another.

[0164] Methods for generating specific antibodies are known to those skilled in the art. Antibodies may be of human or non-human origin (e.g. rodent, such as rat or mouse) and be humanized etc. according to known techniques (Jones et al., Nature (1986) May 29-Jun. 4; 321(6069):522-5; Roguska et al., Protein Engineering, 1996, 9(10):895-904; and Studnicka et al., Humanizing Mouse Antibody Frameworks While Preserving 3-D Structure. Protein Engineering, 1994, Vol. 7, pg 805).

[0165] In certain embodiments the expression level is determined using an antibody or aptamer conjugated to a label. By label is meant a component that permits detection, directly or indirectly. For example, the label may be an enzyme, optionally a peroxidase, or a fluorophore.

[0166] A label is an example of, and may form part of, a detection agent. By detection agent is meant an agent that may be used to assist in the detection of the complex between binding reagent (which may be an antibody, primer or probe for example) and target. The binding agent may form part of the overall detection agent. Where the antibody is conjugated to an enzyme the detection agent may be comprise a chemical composition such that the enzyme catalyses a chemical reaction to produce a detectable product. The products of reactions catalyzed by appropriate enzymes can be, without limitation, fluorescent, luminescent, or radioactive or they may absorb visible or ultraviolet light. Examples of detectors suitable for detecting such detectable labels include, without limitation, x-ray film, radioactivity counters, scintillation counters, spectrophotometers, colorimeters, fluorometers, luminometers, and densitometers. In certain embodiments the detection agent may comprise a secondary antibody. The expression level is then determined using an unlabeled primary antibody that binds to the target protein and a secondary antibody conjugated to a label, wherein the secondary antibody binds to the primary antibody.

[0167] The invention also relates to use of an antibody or aptamer as described above for characterising and/or prognosing a cancer, such as prostate cancer or ER positive breast cancer in a subject.

[0168] Additional techniques for determining expression level at the level of protein include, for example, Western blot, immunoprecipitation, immunocytochemistry, mass spectrometry, ELISA and others (see ImmunoAssay: A Practical Guide, edited by Brian Law, published by Taylor & Francis, Ltd., 2005 edition). To improve specificity and sensitivity of an assay method based on immunoreactivity, monoclonal antibodies are often used because of their specific epitope recognition. Polyclonal antibodies have also been successfully used in various immunoassays because of their increased affinity for the target as compared to monoclonal antibodies.

[0169] According to all aspects of the invention samples may be of any suitable form. The sample is typically intended to contain nucleic acids (DNA and/or RNA), or protein in some embodiments, from the primary tumour (even if no longer contained within the tumour cells e.g. shed into the circulation). The sample may comprise, consist essentially of or consist of cells, such as prostate or breast cells and often a suitable tissue sample (such as a prostate or breast tissue sample). The sample may comprise or be a primary tumour sample. The cells or tissue may comprise cancer cells, such as prostate cancer cells or ER positive breast cancer cells. In specific embodiments the sample comprises, consists essentially of or consists of a biopsy sample, which may be fixed, such as a formalin-fixed paraffin-embedded biopsy sample. The tissue sample may be obtained by any suitable technique. Examples include a biopsy procedure, optionally a fine needle aspirate biopsy procedure. Body fluid samples may also be utilised. Samples may comprise resection material (e.g. where radical prostatectomy has been performed). Suitable sample types include blood, to encompass whole blood, serum and plasma samples, urine and semen.

[0170] The methods described herein may further comprise extracting nucleic acids, DNA and/or RNA from the sample. Suitable methods are known in the art and include use of commercially available kits such as Rneasy and GeneJET RNA purification kit.

[0171] In certain embodiments the methods may further comprise obtaining the sample from the subject. Typically the methods are in vitro methods performed on an isolated sample.

[0172] The methods of the invention may prove useful for determining which patients should undergo a more aggressive therapeutic regime, by identifying high risk cancers (i.e, those within the high metastatic potential group and thus having a poor prognosis).

[0173] The methods of the invention may comprise selecting a treatment for cancer, such as prostate cancer or ER positive breast cancer in a subject and optionally performing the treatment. In certain embodiments if the characterisation of and/or prognosis for the cancer, such as prostate cancer or ER positive breast cancer is an increased likelihood of recurrence and/or metastasis and/or a poor prognosis the treatment selected may be one or more of

[0174] a) an anti-hormone treatment

[0175] b) a cytotoxic agent

[0176] c) a biologic

[0177] d) radiotherapy

[0178] e) targeted therapy

[0179] f) surgery

[0180] By anti-hormone treatment (or hormone therapy) is meant a form of treatment which reduces the level and/or activity of selected hormones, in particular testosterone. The hormones may promote tumour growth and/or metastasis. The anti-hormone treatment may comprise a luteinizing hormone blocker, such as goserelin (also called Zoladex), buserelin, leuprorelin (also called Prostap), histrelin (Vantas) and triptorelin (also called Decapeptyl). The anti-hormone treatment may comprise a gonadotrophin release hormone (GnRH) blocker such as degarelix (Firmagon) or an anti-androgen such as flutamide (also called Drogenil) and bicalutamide (also called Casodex). In specific embodiments the anti-hormone treatment may be bicalutamide and/or abiraterone.

[0181] The cytotoxic agent may be administered as an adjuvant therapy. The cytotoxic agent may be a platinum based agent and/or a taxane. In specific embodiments the platinum based agent is selected from cisplatin, carboplatin and oxaliplatin. The taxane may be paclitaxel, cabazitaxel or docetaxel. The cytotoxic agent may also be a vinca alkaloid, such as vinorelbine or vinblastine. The cytotoxic agent may be a topoisomerase inhibitor such as etoposide or an anthracycline (antibiotic) such as doxorubicin. The cytotoxic agent may be an alkylating agent such as estramustine. Adjuvant taxane and/or topoisomerase inhibitor therapy may be particularly suitable for treatment of ER positive breast cancer.

[0182] By biologic is meant a medicinal product that is created by a biological process. A biologic may be, for example, a vaccine, blood or blood component, cells, gene therapy, tissue, or a recombinant therapeutic protein. Optionally the biologic is an antibody and/or a vaccine. The biologic may be Sipuleucel-T. The biologic may be a cancer immunotherapy.

[0183] In certain embodiments the radiotherapy is extended radiotherapy, preferably extended-field radiotherapy. In specific embodiments, the radiotherapy comprises or is (pelvic) lymph node irradiation. Adjuvant radiation may be employed.

[0184] Surgery may comprise radical prostatectomy. By radical prostatectomy is meant removal of the entire prostate gland, the seminal vesicles and the vas deferens. In further embodiments surgery comprises tumour resection i.e. removal of all or part of the tumour. Surgery may comprise or be extended nodal dissection.

[0185] By targeted therapy is meant treatment using targeted therapeutic agents which are directed towards a specific drug target for the treatment of a cancer, such as prostate cancer or ER positive breast cancer. In specific embodiments this may mean inhibitors directed towards targets such as PARP, AKT, MET, VEGFR etc. PARP inhibitors are a group of pharmacological inhibitors of the enzyme poly ADP ribose polymerase (PARP). Several forms of cancer are more dependent on PARP than regular cells, making PARP an attractive target for cancer therapy. Examples (in clinical trials) include iniparib, olaparib, rucaparib, veliparib, CEP 9722, MK 4827, BMN-673 and 3-aminobenzamide. AKT, also known as Protein Kinase B (PKB), is a serine/threonine-specific protein kinase that plays a key role in multiple cellular processes such as glucose metabolism, apoptosis, cell proliferation, transcription and cell migration. AKT is associated with tumor cell survival, proliferation, and invasiveness. Examples of AKT inhibitors include VQD-002, Perifosine, Miltefosine and AZD5363. MET is a proto-oncogene that encodes hepatocyte growth factor receptor (HGFR). The hepatocyte growth factor receptor protein possesses tyrosine-kinase activity. Examples of kinase inhibitors for inhibition of MET include K252a, SU11274, PHA-66752, ARQ197, Foretinib, SGX523 and MP470. MET activity can also be blocked by inhibiting the interaction with HGF. Many suitable antagonists including truncated HGF, anti-HGF antibodies and uncleavable HGF are known. VEGF receptors are receptors for vascular endothelial growth factor (VEGF). Various inhibitors are known such as lenvatinib, motesanib, pazopanib and regorafenib.

[0186] If the method identifies the cancer as not within the high metastatic potential group, then different decisions may be taken. If the cancer has already been treated e.g. by radiotherapy or surgery, the decision may be taken not to treat the cancer further. The decision may be taken to continue to monitor the cancer, by any suitable means (e.g. by PSA levels or using the methods of the invention), and not perform any further treatment if the cancer remains in the same state.

[0187] The methods of the present invention can guide therapy selection as well as selecting patient groups for enrichment strategies during clinical trial evaluation of novel therapeutics. For example, when evaluating a putative anti-cancer agent or treatment regime, the methods disclosed herein may be used to select individuals for clinical trials that have cancer, such as prostate cancer or ER positive breast cancer, characterized as having an increased likelihood of recurrence and/or metastasis and/or a poor prognosis.

[0188] The invention also relates to a system or device or test kit for performing a method as described herein.

[0189] In a further aspect, the present invention relates to a system, device or test kit for characterising and/or prognosing cancer, such as prostate cancer or ER positive breast cancer in a subject, comprising:
[0190] a) one or more testing devices that determine the expression level of at least gene selected from Table 1 in a sample from the subject
[0191] b) a processor; and
[0192] c) storage medium comprising a computer application that, when executed by the processor, is configured to:
   [0193] (i) access and/or calculate the determined expression levels of the at least gene selected from Table 1 in the sample on the one or more testing devices
   [0194] (ii) calculate whether there is an increased or decreased level of the at least one gene selected from Table 1 in the sample; and
   [0195] (iii) output from the processor the characterisation of and/or prognosis for the cancer, such as prostate cancer or ER positive breast cancer.

[0196] By testing device is meant a combination of components that allows the expression level of a gene to be determined. The components may include any of those described above with respect to the methods for determining expression level at the level of protein, RNA or epigenetic modification. For example the components may be antibodies, primers, detection agents and so on. Components may also include one or more of the following: microscopes, microscope slides, x-ray film, radioactivity counters, scintillation counters, spectrophotometers, colorimeters, fluorometers, luminometers, and densitometers. The discussion of the methods of the invention thus applies mutatis mutandis to these aspects of the invention.

[0197] In certain embodiments the system, device or test kit further comprises a(n electronic) display for the output from the processor.

[0198] The invention also relates to a computer application or storage medium comprising a computer application as defined above.

[0199] In certain example embodiments, provided is a computer-implemented method, system, and a computer program product for characterising and/or prognosing cancer, such as prostate cancer or ER positive breast cancer in a subject, in accordance with the methods described herein. For example, the computer program product may comprise a non-transitory computer-readable storage device having computer-readable program instructions embodied thereon that, when executed by a computer, cause the computer to characterise and/or prognose cancer, such as prostate cancer or ER positive breast cancer in a subject as described herein. For example, the computer executable instructions may cause the computer to:

[0200] (i) access and/or calculate the determined expression levels of the at least one gene selected from Table 1 in a sample on one or more testing devices;

[0201] (ii) calculate whether there is an increased or decreased level of the at least one gene selected from Table 1 in the sample; and,

[0202] (iii) provide an output regarding the characterization of and/or prognosis for the cancer, such as prostate cancer or ER positive breast cancer.

[0203] In certain example embodiments, the computer-implemented method, system, and computer program product may be embodied in a computer application, for example, that operates and executes on a computing machine and a module. When executed, the application may characterise and/or prognose cancer, such as prostate cancer or ER positive breast cancer in a subject, in accordance with the example embodiments described herein.

[0204] As used herein, the computing machine may correspond to any computers, servers, embedded systems, or computing systems. The module may comprise one or more hardware or software elements configured to facilitate the computing machine in performing the various methods and processing functions presented herein. The computing machine may include various internal or attached components such as a processor, system bus, system memory, storage media, input/output interface, and a network interface for communicating with a network, for example. The computing machine may be implemented as a conventional computer system, an embedded controller, a laptop, a server, a customized machine, any other hardware platform, such as a laboratory computer or device, for example, or any combination thereof. The computing machine may be a distributed system configured to function using multiple computing machines interconnected via a data network or bus system, for example.

[0205] The processor may be configured to execute code or instructions to perform the operations and functionality described herein, manage request flow and address mappings, and to perform calculations and generate commands. The processor may be configured to monitor and control the operation of the components in the computing machine. The processor may be a general purpose processor, a processor core, a multiprocessor, a reconfigurable processor, a microcontroller, a digital signal processor (“DSP”), an application specific integrated circuit (“ASIC”), a graphics processing unit (“GPU”), a field programmable gate array (“FPGA”), a programmable logic device (“PLD”), a controller, a state machine, gated logic, discrete hardware components, any other processing unit, or any combination or multiplicity thereof. The processor may be a single processing unit, multiple processing units, a single processing core, multiple processing cores, special purpose processing cores, co-processors, or any combination thereof. According to certain example embodiments, the processor, along with other components of the computing machine, may be a virtualized computing machine executing within one or more other computing machines.

[0206] The system memory may include non-volatile memories such as read-only memory (“ROM”), programmable read-only memory (“PROM”), erasable programmable read-only memory (“EPROM”), flash memory, or any other device capable of storing program instructions or data with or without applied power. The system memory may also include volatile memories such as random access memory (“RAM”), static random access memory (“SRAM”), dynamic random access memory (“DRAM”), and synchronous dynamic random access memory (“SDRAM”). Other types of RAM also may be used to implement the system memory. The system memory may be implemented using a single memory module or multiple memory modules. While the system memory may be part of the computing machine, one skilled in the art will recognize that the system memory may be separate from the computing machine without departing from the scope of the subject technology. It should also be appreciated that the system memory may include, or operate in conjunction with, a non-volatile storage device such as the storage media.

[0207] The storage media may include a hard disk, a floppy disk, a compact disc read only memory (“CD-ROM”), a digital versatile disc (“DVD”), a Blu-ray disc, a magnetic tape, a flash memory, other non-volatile memory device, a solid state drive (“SSD”), any magnetic storage device, any optical storage device, any electrical storage device, any semiconductor storage device, any physical-based storage device, any other data storage device, or any combination or multiplicity thereof. The storage media may store one or more operating systems, application programs and program modules such as module, data, or any other information. The storage media may be part of, or connected to, the computing machine. The storage media may also be part of one or more other computing machines that are in communication with the computing machine, such as servers, database servers, cloud storage, network attached storage, and so forth.

[0208] The module may comprise one or more hardware or software elements configured to facilitate the computing machine with performing the various methods and processing functions presented herein. The module may include one or more sequences of instructions stored as software or firmware in association with the system memory, the storage media, or both. The storage media may therefore represent examples of machine or computer readable media on which instructions or code may be stored for execution by the processor. Machine or computer readable media may generally refer to any medium or media used to provide instructions to the processor. Such machine or computer readable media associated with the module may comprise a computer software product. It should be appreciated that a computer software product comprising the module may also be associated with one or more processes or methods for delivering the module to the computing machine via a network, any signal-bearing medium, or any other communication or delivery technology. The module may also comprise hardware circuits or information for configuring hardware circuits such as microcode or configuration information for an FPGA or other PLD.

[0209] The input/output (“I/O”) interface may be configured to couple to one or more external devices, to receive data from the one or more external devices, and to send data to the one or more external devices. Such external devices along with the various internal devices may also be known as peripheral devices. The I/O interface may include both electrical and physical connections for operably coupling the various peripheral devices to the computing machine or the processor. The I/O interface may be configured to communicate data, addresses, and control signals between the peripheral devices, the computing machine, or the processor. The I/O interface may be configured to implement any standard interface, such as small computer system interface (“SCSI”), serial-attached SCSI (“SAS”), fiber channel, peripheral component interconnect (“PCI”), PCI express (PCIe), serial bus, parallel bus, advanced technology attached (“ATA”), serial ATA (“SATA”), universal serial bus (“USB”), Thunderbolt, FireWire, various video buses, and the like. The I/O interface may be configured to implement only one interface or bus technology.

[0210] Alternatively, the I/O interface may be configured to implement multiple interfaces or bus technologies. The I/O interface may be configured as part of, all of, or to operate in conjunction with, the system bus. The I/O interface may include one or more buffers for buffering transmissions between one or more external devices, internal devices, the computing machine, or the processor.

[0211] The I/O interface may couple the computing machine to various input devices including mice, touch-screens, scanners, electronic digitizers, sensors, receivers, touchpads, trackballs, cameras, microphones, keyboards, any other pointing devices, or any combinations thereof. The I/O interface may couple the computing machine to various output devices including video displays, speakers, printers, projectors, tactile feedback devices, automation control, robotic components, actuators, motors, fans, solenoids, valves, pumps, transmitters, signal emitters, lights, and so forth.

[0212] The computing machine may operate in a networked environment using logical connections through the network interface to one or more other systems or computing machines across the network. The network may include wide area networks (WAN), local area networks (LAN), intranets, the Internet, wireless access networks, wired networks, mobile networks, telephone networks, optical networks, or combinations thereof. The network may be packet switched, circuit switched, of any topology, and may use any communication protocol. Communication links within the network may involve various digital or an analog communication media such as fiber optic cables, free-space optics, waveguides, electrical conductors, wireless links, antennas, radio-frequency communications, and so forth. The processor may be connected to the other elements of the computing machine or the various peripherals discussed herein through the system bus. It should be appreciated that the system bus may be within the processor, outside the processor, or both. According to some embodiments, any of the processor, the other elements of the computing machine, or the various peripherals discussed herein may be integrated into a single device such as a system on chip (“SOC”), system on package (“SOP”), or ASIC device.

[0213] Embodiments may comprise a computer program that embodies the functions described and illustrated herein, wherein the computer program is implemented in a computer system that comprises instructions stored in a machine-readable medium and a processor that executes the instructions. However, it should be apparent that there could be many different ways of implementing embodiments in computer programming, and the embodiments should not be construed as limited to any one set of computer program instructions. Further, a skilled programmer would be able to write such a computer program to implement one or more of the disclosed embodiments described herein. Therefore, disclosure of a particular set of program code instructions is not considered necessary for an adequate understanding of how to make and use embodiments. Further, those skilled in the art will appreciate that one or more aspects of embodiments described herein may be performed by hardware, software, or a combination thereof, as may be embodied in one or more computing systems. Moreover, any reference to an act being performed by a computer should not be construed as being performed by a single computer as more than one computer may perform the act.

[0214] The example embodiments described herein can be used with computer hardware and software that perform the methods and processing functions described previously. The systems, methods, and procedures described herein can be embodied in a programmable computer, computer-executable software, or digital circuitry. The software can be stored on computer-readable media. For example, computer-readable media can include a floppy disk, RAM, ROM, hard disk, removable media, flash memory, memory stick, optical media, magneto-optical media, CD-ROM, etc. Digital circuitry can include integrated circuits, gate arrays, building block logic, field programmable gate arrays (FPGA), etc.

[0215] Reagents, tools, and/or instructions for performing the methods described herein can be provided in a kit. Such a kit can include reagents for collecting a tissue sample from a patient, such as by biopsy, and reagents for processing the tissue. Thus, the kit may include suitable fixatives, such as formalin and embedding reagents, such as paraffin. The kit can also include one or more reagents for performing an expression level analysis, such as reagents for performing nucleic acid amplification, including RT-PCR and qPCR, NGS (RNA-seq), northern blot, proteomic analysis, or immunohistochemistry to determine expression levels of biomarkers in a sample of a patient. For example, primers for performing RT-PCR, probes for performing northern blot analyses or bDNA assays, and/or antibodies or aptamers, as discussed herein, for performing proteomic analysis such as Western blot, immunohistochemistry and ELISA analyses can be included in such kits. Appropriate buffers for the assays can also be included. Detection reagents required for any of these assays can also be included. The kits may be array or PCR based kits for example and may include additional reagents, such as a polymerase and/or dNTPs for example. The kits featured herein can also include an instruction sheet describing how to perform the assays for measuring expression levels.

[0216] There is provided a kit for characterising and/or prognosing cancer in a subject comprising one or more primers and/or primer pairs for amplifying and/or which specifically hybridize with at least one gene, full sequence or target sequence selected from Table 1. There is also provided a kit for characterising and/or prognosing cancer in a subject comprising one or more probes that specifically hybridize with at least one gene, full sequence or target sequence selected from Table 1.

[0217] The kit may include one or more primer pairs and/or probes complementary to at least one gene selected from Table 1. In certain embodiments, according to all aspects of the invention, the kits may include one or more probes or primers (primer pairs) designed to hybridize with the target sequences or full sequences listed in Table 1 and thus permit expression levels to be determined. The probes and probesets identified in table 1 and 1A may be employed according to all aspects of the invention. The primers and primer pairs identified in Table 1B may also be employed according to all aspects of the invention.

[0218] The kits may include primers/primer pairs/probes/probesets to form any of the gene signatures specified herein (see for example the gene signatures of Tables 1 to 24).

[0219] The kits may also include one or more primer pairs complementary to a reference gene.

[0220] Such a kit can also include primer pairs complementary to at least 2, 3, 4, 5, 6, 7, 8, 9, 10, 11, 12, 13, 14, 15, 16, 17, 18, 19, 20, 21, 22, 23, 24, 25, 26, 27, 28, 29, 30, 31, 32, 33, 34, 35, 36, 37, 38, 39, 40, 41, 42, 43, 44, 45, 46, 47, 48, 49, 50, 51, 52, 53, 54, 55, 56, 57, 58, 59, 60, 61, 62, 63, 64, 65, 66, 67, 68, 69 or 70 of the genes listed in Table 1.

[0221] Thus, in a further aspect the present invention relates to a kit for (in situ) characterising and/or prognosing prostate cancer in a subject comprising one or more oligonucleotide probes specific for an RNA product of at least one gene selected from Table 1. Suitable probes and probesets for each gene are listed in Table 1 and may be incorporated in the kits of the invention. The probes and probesets also constitute separate aspects of the invention. By “probeset” is meant the collection of probes designed to target (by hybridization) a single gene. The groupings are apparent from table 1 (and Table 1A).

[0222] The kit may further comprise one or more of the following components:
[0223] a) A blocking probe
[0224] b) A PreAmplifier
[0225] c) An Amplifier and/or
[0226] d) A Label molecule

[0227] The components of the kit may be suitable for conducting a viewRNA assay (https://www.panomics.com/products/rna-in-situ-analysis/view-rna-overview).

[0228] The components of the kit may be nucleic acid based molecules, optionally DNA (or RNA). The blocking probe is a molecule that acts to reduce background signal by binding to sites on the target not bound by the target specific probes (probes specific for the RNA product of the at least one gene of the invention). The PreAmplifier is a molecule capable of binding to a (a pair of) target specific probe(s) when target bound. The Amplifier is a molecule capable of binding to the PreAmplifier. Alternatively, the Amplifier may be capable of binding directly to a (a pair of) target specific probe(s) when target bound. The Amplifier has binding sites for multiple label molecules (which may be label probes).

[0229] Kits for characterising and/or prognosing cancer, such as prostate cancer or ER positive breast cancer in a subject may permit the methylation status of at least one gene selected from Table 1 to be determined. The determined methylation status, which may be hypermethylation or hypomethylation as appropriate, is used to provide a characterisation of and/or a prognosis for the cancer, such as prostate cancer or ER positive breast cancer. Such kits may include primers and/or probes for determining the methylation status of the gene or genes directly. They may thus comprise methylation specific primers and/or probes that discriminate between methylated and unmethylated forms of DNA by hybridization. Such primers and/or probes may include derivatives of the primers and probes described herein, which are adapted to reflect selective modification of the cytosine residues in the target sequence depending upon whether they are methylated or not. Thus, sets of “methylated-specific” and “unmethylated-specific” primers (to include primer pairs) and probes may be designed in order to probe particular cytosine-containing target sequences. Such kits will typically also contain a reagent that selectively modifies either the methylated or non-methylated form of CpG dinucleotide motifs. Suitable chemical reagents comprise hydrazine and bisulphite ions. An example is sodium bisulphite. The kits may, however, contain other reagents as discussed hereinabove to determine methylation status such as restriction endonucleases. Methylation specific PCR primers may be derived from the primer pairs of Table 1B and of SEQ ID NOs 3151-3154, to take account of bisulphite conversion of CpG dinucleotide pairs if present in the unmethylated form (unmethylated-specific) or lack of conversion if the CpG dinucleotide is methylated (methylated-specific).

[0230] The invention also relates to a kit for characterising and/or prognosing cancer, such as prostate cancer or ER positive breast cancer in a subject comprising one or more antibodies or aptamers as described above and which are useful in the methods of the invention.

[0231] Informational material included in the kits can be descriptive, instructional, marketing or other material that relates to the methods described herein and/or the use of the reagents for the methods described herein. For example, the informational material of the kit can contain contact information, e.g., a physical address, email address, website, or telephone number, where a user of the kit can obtain substantive information about performing a gene expression analysis and interpreting the results.

[0232] The kit may further comprise a computer application or storage medium as described above.

[0233] The example systems, methods, and acts described in the embodiments presented previously are illustrative, and, in alternative embodiments, certain acts can be performed in a different order, in parallel with one another, omitted entirely, and/or combined between different example embodiments, and/or certain additional acts can be performed, without departing from the scope and spirit of various embodiments. Accordingly, such alternative embodiments are included in the scope of the invention as described herein.

[0234] Although specific embodiments have been described above in detail, the description is merely for purposes of illustration. It should be appreciated, therefore, that many aspects described above are not intended as required or essential elements unless explicitly stated otherwise.

[0235] Modifications of, and equivalent components or acts corresponding to, the disclosed aspects of the example embodiments, in addition to those described above, can be made by a person of ordinary skill in the art, having the benefit of the present disclosure, without departing from the spirit and scope of embodiments defined in the following claims, the scope of which is to be accorded the broadest interpretation so as to encompass such modifications and equivalent structures.

### DESCRIPTION OF THE FIGURES

[0236] FIG. 1: Heat map showing unsupervised hierarchical clustering of gene expression data using the 1000 most variable genes in the 126 prostate FFPE tumour samples. Gene expression across all samples is represented horizontally. Functional processes corresponding to each gene cluster are labeled along the right of the figure.

[0237] FIG. 2: AUC calculated under cross validation with respect to associating the signature scores with discriminating the molecular subgroups (cluster 1 and 2 V cluster 3 and 4). The number of genes in each signature is depicted along the x-axis and the AUC on the y-axis.

[0238] FIG. 3: C-index calculated under cross validation with respect to associating the signature scores with time to metastatic recurrence in the Taylor primary tumour samples. The number of genes in each signature is depicted along the x-axis and the C-index on the y-axis.

[0239] FIG. 4: Standard Deviation (SD) calculated as a percentage of the signature score range under cross validation within the five sections that were profiled to evaluate the impact of biological heterogeneity on signature score The number of genes in each signature is depicted along the x-axis and the percent SD on the y-axis.

[0240] FIG. 5: Kaplan Meier generated in the Taylor primary tumour samples using the time to metastatic recurrence endpoint and the Good/Poor prognosis 70 gene signature predictions. Univariate hazard ratio=0.62 [1.98,20.20]; p<0.0001

[0241] FIG. 6: Kaplan Meier generated in the Taylor primary tumour samples using the time to biochemical recurrence endpoint and the Good/Poor prognosis 70 gene signature predictions. Univariate hazard ratio=3.76 [1.70, 8.34]; p<0.0001

[0242] FIG. 7: Wald test of multivariate Cox analysis of key prognostic factors from Taylor analysis

[0243] FIG. 8A: ROC curve in the Glinsky data using the 70 gene signature scores and the corresponding biochemical recurrence outcome for each patient. The AUC=0.69 [0.57, 0.79]; p=0.0032.

[0244] FIG. 8B: ROC curve in the Erho data using the 70 gene signature scores and the corresponding metastatic recurrence outcome for each patient. The AUC=0.61 [0.57, 0.65]; p<0.0001.

[0245] FIG. 9: Kaplan Meier generated in the breast cancer data (GSE2034) ER positive tumour samples using the time to relapse endpoint (time in months) and the Good/Poor prognosis 70 gene signature predictions; signature_call_median 1 (poor prognosis) and signature_call_median 0 (good prognosis). Univariate hazard ratio=1.24 [0.80, 1.92]

[0246] FIG. 10: ROC curve in the breast cancer data (GSE2034) ER positive tumour samples using the 70 gene signature scores and the corresponding recurrence outcome for each patient. The AUC=0.62; p=0.002

[0247] FIG. 11: Kaplan Meier generated in the breast cancer data (GSE7390) ER positive tumour samples using the relapse free survival endpoint (time in days) and the Good/Poor prognosis 70 gene signature predictions; signature_call_median 1 (poor prognosis) and signature_call_median 0 (good prognosis). Univariate hazard ratio=1.74 [1.04, 2.93]

[0248] FIG. 12: Kaplan Meier generated in the breast cancer data (GSE7390) ER positive tumour samples using the distant metastasis free survival endpoint (time in days) and the Good/Poor prognosis 70 gene signature predictions; signature_call_median 1 (poor prognosis) and signature_call_median 0 (good prognosis). Univariate hazard ratio=2.01 [1.02, 3.96]

[0249] FIG. 13: Kaplan Meier generated in the breast cancer data (GSE7390) ER positive tumour samples using the overall survival endpoint (time in days) and the Good/Poor prognosis 70 gene signature predictions; signature_call_median 1 (poor prognosis) and signature_call_median 0 (good prognosis). Univariate hazard ratio=2.54 [1.24, 5.18]

[0250] FIG. 14: Kaplan Meier generated in the breast cancer data (GSE2990) ER positive tumour samples using the relapse free survival endpoint (time in years) and the Good/Poor prognosis 70 gene signature predictions; signature_call_median 1 (poor prognosis) and signature_call_median 0 (good prognosis). Univariate hazard ratio=1.91 [1.17, 3.09]

[0251] FIG. 15: Kaplan Meier generated in the breast cancer data (GSE2990) ER positive tumour samples using the distant metastasis free survival endpoint (time in years) and the Good/Poor prognosis 70 gene signature predictions; signature_call_median 1 (poor prognosis) and signature_call_median 0 (good prognosis). Univariate hazard ratio=2.37 [1.26, 4.44]

[0252] FIG. 16—Kaplan Meier survival analysis over 10-years showing the association of the 70-gene signature at predicting time to biochemical recurrence in the resection validation cohort following surgery. Surivival probability (%) showed reduced progression-free survival (PFS) in months of the ‘Met-like’ subgroup (blue) of 81 patients when compared to the ‘Non Met-like’ subgroup (green) of 241 patients (HR=1.74 [1.18-2.56]; p=0.0009).

[0253] FIG. 17—Kaplan Meier survival analysis over 10-years showing the association of the 70-gene signature at predicting time to metastatic disease progression in the resection validation cohort following surgery. Surivival probability (%) showed reduced progression-free survival (PFS) in months of the ‘Met-like’ subgroup (blue) of 81 patients when compared to the ‘Non Met-like’ subgroup (green) of 241 patients (HR=3.60 [1.81-7.13]; p<0.0001).

[0254] FIG. 18—Kaplan Meier survival analysis over 10-years showing the association of the 70-gene signature at predicting time to biochemical recurrence in the FASTMAN biopsy validation cohort following curative radiotherapy. Surivival probability (%) showed reduced progression-free survival (PFS) in months of the ‘Met-like’ subgroup (blue) of 54 patients when compared to the ‘Non Met-like’ subgroup (green) of 194 patients (HR=2.18 [1.14-4.17]; p=0.0042).

[0255] FIG. 19—Kaplan Meier survival analysis over 10 years showing the association of the 70-gene signature at predicting time to metastatic disease progression in the FASTMAN biopsy validation cohort following radiotherapy with curative intent. Surivival probability (%) showed reduced progression-free survival (PFS) in months of the ‘Met-like’ subgroup (blue) of 54 patients when compared to the ‘Non Met-like’ subgroup (green) of 194 patients (HR=3.50 [1.28-9.56]; p=0.0017).

[0256] FIG. 20—Core set analysis for FASTMAN Biopsy Validation dataset.

[0257] FIG. 21—Core set analysis for internal resection validation dataset.

[0258] FIG. 22—Minimum gene set analysis for FASTMAN Biopsy Validation dataset.

[0259] FIG. 23—Minimum gene set analysis for internal resection validation dataset.

### EXAMPLES

[0260] The present invention will be further understood by reference to the following experimental examples.

### Example 1: Tissue Processing, Hierarchical Clustering and Subtype Identification

[0261] Tumor Material

[0262] 70 primary prostate cancers with no known concomitant metastases, 20 primary prostate cancers with known lymph node metastases, 11 lymph nodes containing metastatic prostate cancer, 25 normal prostate samples.

[0263] Gene Expression Profiling from FFPE

[0264] Total RNA was extracted from macrodissected FFPE tissue using the High Pure RNA Paraffin Kit (Roche Diagnostics GmbH, Mannheim, Germany). RNA was converted into complementary deoxyribonucleic acid (cDNA), which was subsequently amplified and converted into single-stranded form using the SPIA® technology of the WT-Ovation™ FFPE RNA Amplification System V2 (NuGEN Technologies Inc., San Carlos, Calif., USA). The amplified single-stranded cDNA was then fragemented and biotin labeled using the FL-Ovation™ cDNA Biotin Module V2 (NuGEN Technologies Inc.). The fragmented and labeled cDNA was then hybridized to the Almac Prostate Cancer DSA™. Almac's Prostate Cancer DSA™ research tool has been optimised for analysis of FFPE tissue samples, enabling the use of valuable archived tissue banks. The Almac Prostate Cancer DSA™ research tool is an innovative microarray platform that represents the transcriptome in both normal and cancerous prostate tissues. Consequently, the Prostate Cancer DSA™ provides a comprehensive representation of the transcriptome within prostate disease and tissue setting, not available using generic microarray platforms. Arrays were scanned using the Affymentrix Genechip® Scanner 7G (Affymetrix Inc., Santa Clara, Calif.).

[0265] Data Preparation

[0266] Quality Control (QC) of profiled samples was carried out using MASS pre-processing algorithm. Various technical aspects were assessed including: average noise and background homogeneity, percentage of present call (array quality), signal quality, RNA quality and hybridization quality. Distributions and Median Absolute Deviation of corresponding parameters were analyzed and used to identify possible outliers.

[0267] Almac's Prostate Cancer DSA™ contains probes that primarily target the area within 300 nucleotides from the 3′ end. Therefore standard Affymetrix RNA quality measures were adapted—for housekeeping genes intensities of 3′ end probe sets with ratios of 3′ end probe set intensity to the average background intensity were used in addition to usual 375′ ratios. Hybridization controls were checked to ensure that their intensities and present calls conform to the requirements specified by Affymetrix.

[0268] Hierarchical Clustering and Functional Analysis

[0269] Sample pre-processing was carried out using Robust Multi-Array analysis (RMA) [1]. The data matrix was initially summarised to Entrez gene ID level using Ensemble annotation version 75, specifically ustilising the probe set that was least associated to present call for each Entrez gene. Probe sets that 1) did not map to an Entrez gene ID or 2) mapped to multiple Entrez gene IDs were removed. The resulting gene level data matrix was sorted by decreasing variance and intensity and incremental subsets of the data matrix were tested for cluster stability: the GAP statistic [2] was applied to calculate the number of sample and gene clusters while the stability of cluster composition was assessed using partition comparison methods. The final most variable gene list was determined based on the smallest and most stable data matrix for the selected number of sample cluster.

[0270] Following standardization of the data matrix to the median gene expression values, agglomerative hierarchical clustering was performed using Euclidean distance and Ward's linkage method [3]. The optimal number of sample and gene clusters was determined using the GAP statistic [2] which compares the change in with-cluster dispersion with that expected under a reference null distribution. The significance of the distribution of clinical parameter factor levels across sample clusters was assessed using ANOVA (continuous factor) or chi-squared analysis (discrete factor) and corrected for false discovery rate (product of p-value and number of tests performed). A corrected p-value threshold of 0.05 was used as criterion for significance.

[0271] Functional enrichment analysis was conducted to identify and rank biological entities which were found to be associated with the clustered gene sets using the Gene Ontology biological processes classification [4]. Entities were ranked according to a statistically derived enrichment score [5] and adjusted for multiple testing [6]. A corrected p-value of 0.05 was used as significance threshold. The identified enriched processes were summarised into an overall group function for each gene cluster.

[0272] From the hierarchical clustering analysis, primary tumour samples clustering with metastatic samples will be labelled as tad whereas primary tumour samples clustering with normal samples will be labelled as ‘good’.

[0273] Signature Generation

[0274] Following the identification of class labels a gene signature was derived to enable prospective identification of the bad prognosis group within the primary tumour samples. The following steps summarise the procedure for developing the gene signature:
[0275] 1. Cross-validation: The samples were randomly split into 5 cross-validation (CV) folds for signature training/testing, and this was repeated 10 times to allow an unbiased estimation of the model performance.
[0276] 2. Pre-processing: RMA background correction of the data at the probe intensity level, followed by a median summary of the intensities of probes to probe sets and subsequently probe sets to Entrez gene ID. The Entrez gene level summarised data matrix was log 2 transformed and quantile normalised. Note that samples in the CV test set were normalised using a quantile normalisation model from the corresponding CV training set to ensure that all estimates of model performance are based on signature scores pre-processed on a per sample basis.
[0277] 3. Filtering: A gene filter was applied before model development to remove 75 percent of genes with low variance and low intensity.
[0278] 4. Machine Learning: Partial Least Squares (PLS) was used to train the algorithm against the “good/poor prognosis” endpoint.
[0279] 5. Feature Selection: A wrapper based method for feature selection was implemented, where genes (those remaining after the initial filter) are ranked using the respective weights defined by the PLS algorithm and 10 percent of genes with the lowest absolute weights are removed. This process is repeated after each round of feature elimination (within cross validation) where the genes are re-ranked in order to determine the genes with the lowest absolute weights and removing 10 percent each time until only 2 genes remained.
[0280] 6. Interim validation data set 1: A public data set (Taylor et al) was used for interim evaluation were the primary tumour samples from this data set were predicted (signature scores calculated) alongside each CV test set.
[0281] 7. Interim validation data set 2: Five sections across an FFPE tumour block were profiled in order to evaluate the impact of biological heterogeneity on the signature score. Signature scores for each of these sections were calculated under CV alongside each CV test set.

[0282] Model selection included the following steps:
[0283] 1. Evaluating the Area Under the Receiver Operating Characteristic (ROC) Curve (AUC) in the training data under cross validation.
[0284] 2. Evaluating the C-index in the interim validation Taylor data under cross validation. The C-index is a measure of performance (analogous to AUC) relating to predicting time-to-event data in absence of the threshold for dichotomising the scores for assigning “good” and “poor” prognosis groups.
[0285] 3. Evaluating the variability in signature scores across the five sections of an FFPE block which were predicted under CV. The variability was determined by calculating the standard deviation (SD) of the signature scores across the five samples and expressing the SD as a fraction of the signature score range (i.e. calculating a percent SD).

[0286] The signature length that yielded a high AUC in training set; a high C-index in the Taylor set; and a low SD in the heterogeneity samples was selected.

[0287] Multivariate Analysis

[0288] Of interest is the time until biochemical recurrence in prostate cancer patients in the Taylor dataset. Multivariable Cox survival modelling was used to test for and describe interactions with the biomarker, understand prognostic factors and model the relative effect of prognostic factors. Based on clinical judgement pre-operative PSA (4 ng/ml), pathology stage (“T2 A/B/C”, “T3 A/B/C”, “T4”), Gleason (<7, 7, 8-9) and the dichotomised signature score were used as independent predictor variables. A log 2 transformation of pre-operative PSA was applied. Multiple imputation was used to ensure all available events were used in the analysis. The sample size is 168 patients with 46 biochemical recurrence events and the median time until biochemical recurrence approximately 15 years. A formal test of the proportional hazard assumption, assessment of the functional form of the log transformation of Pre PSA and the model fit using a graphical plot of the Nelson-Aalen cumulative hazard function all provided no cause for concern. Twelve influential data points defined by a change to the regression coefficient equal to or greater than 2 standard errors on removal from the analysis were identified. These were not removed or investigated further.

[0289] Following model selection two independent prostate cancer data sets were further evaluated with the final model:
[0290] 1. 70 publically available primary prostate tumour samples (Glinsky et al) which were profiled on the Affymetrix U133A platform.
   [0291] a. Clinical information included biochemical recurrence (as a binary outcome only)
[0292] 2. 545 publically available primary prostate tumour samples (Erho et al 2013) which were profiled on the Affymetrix Human Exon array platform.
   [0293] a. Clinical information included metastatic recurrence (as a binary outcome only)

[0294] Performance of each of these data sets was evaluated using AUC, to establish if the signature could discriminate patients with recurrences from those with no recurrences, under the hypothesis that higher scores are more representative of patients with metastatic-like disease (bad prognosis) therefore more likely to have a recurrence outcome.

[0295] Evaluation of the Final Model in Breast Cancer Data Sets

[0296] It was of further interest to evaluate the final signature in other hormone related data sets with respect to predicting prognosis in untreated patients. Three ER positive breast cancer data sets were evaluated:
[0297] 1. Data set retrieved from Gene Expression Omnibus database, accession number GSE2034
   [0298] a. 209 Node negative ER positive patients
   [0299] b. Endpoint: Time to relapse
[0300] 2. Data set retrieved from Gene Expression Omnibus database, accession number GSE7390
[0301] a. 134 Node negative ER positive patients
[0302] b. Endpoint 1: relapse free survival (RFS)
[0303] c. Endpoint 2: distant metastasis free survival (DMFS)
[0304] d. Endpoint 3: overall survival (OS)

[0305] 3. Data set retrieved from Gene Expression Omnibus database, accession number GSE2990
[0306] a. 149 ER positive patients
[0307] b. Endpoint 1: relapse free survival (RFS)
[0308] c. Endpoint 2: distant metastasis free survival (DMFS)

[0309] For each data set a median signature score cut-off was applied to predict patients as either signature positive (metastatic-like) if they scored above the median value, or signature negative (non-metastatic-like) otherwise. Kaplan Meier curve was used to observe the survival differences between the two subgroups of patients. Cox proportional hazard regression analysis of the signature calls against each endpoint was used to calculate a univariate hazard ratio for the signature as a measure of performance against the respective clinical endpoint.

[0310] Results

[0311] 126 samples passed microarray QC and subsequently underwent unsupervised hierarchical clustering based on 1000 most variable genes. Four sample clusters and four gene clusters were identified (FIG. 1). There was a significant association between sample clusters and tumour type: cluster 1 and 2 (highlighted with blue box) comprised mainly metastatic and primary tumours and cluster 3 (highlighted with red box) and 4 (highlighted with yellow box) comprised benign and primary tumours respectively (p<0.0001, Table 1). Functional analysis (FIG. 1) revealed that clusters 1 and 2 (metastatic and primary like metastatic tumours) were characterized by down-regulation of genes associated with cell adhesion, cell differentiation and cell development, up-regulation of Androgen related processes and Epithelial to mesenchymal transition (EMT) (cluster 1 and 2 referred to as “bad prognosis” group forthwith). Cluster 3 and cluster 4 (benign and primary like benign tumours) were associated with up-regulation of genes associated with cell adhesion, inflammatory responses and cell development (cluster 3 and cluster 4 referred to as “good prognosis” forthwith). Patients in cluster 1 and cluster 2 were class labelled “bad prognosis” and patients in cluster 3 and cluster 4 were class labelled as “good prognosis” for the purpose of signature development.

[0312] The results from signature development at all considered signature lengths are provided in FIG. 2, FIG. 3 and FIG. 4 which respectively show; the AUC in the training set for predicting the endpoint; the C-index in the Taylor data with respect to time to metastatic recurrence; and the percent SD in the heterogeneity samples. A signature length of 70 genes was selected as this was the signature length whereby the AUC remained high (FIG. 2); the SD remained low (FIG. 4); and is the smallest signature length were the c-index values remained high in the Taylor samples (FIG. 3).

[0313] The signature content and weightings of the final 70 gene model are listed in Table 1. The 70 gene scores calculated in the Taylor data were dichotomised at a threshold of 0.4241 where patients with a signature score >0.4241 were classified as “bad prognosis” and patients with a signature score 0.4241 were classified as “good prognosis”. The signature classifications into good and poor prognosis were used to generate a Kaplan Meier curve to show the differences in survival probabilities for the two predicted groups. FIG. 5 represents the Kaplan Meier for the time to metastatic recurrence endpoint (univariate hazard ratio=6.32 [1.98, 20.20]) and FIG. 6 represents the Kaplan Meier for the time to biochemical recurrence endpoint (univariate hazard ratio=3.76 [1.70, 8.34]).

[0314] FIG. 7 and the associated table present the results of the multivariable analysis. The plot displays the Wald chi squared statistic minus its degrees of freedom for assessing the partial effect of each variable in the model. Gleason is the most important factor followed by the biomarker (i.e gene signature) and pre-operative PSA. These results demonstrate that the biomarker provides additional prognostic information over and above standard pathological factors. Due to the interaction of the biomarker and pre-operative PSA, one potential would be to combine these variables (and/or other prognostic factors) together to generate a combined risk score. The 70 gene signature model was applied to two independent prostate cancer data sets.

[0315] FIG. 8A and FIG. 8B show the ROC curves from assessing the signature scores against the recurrence outcomes for the Glinksy and the Erho data sets respectively. The AUC in the Glinsky data for predicting biochemical recurrence was 0.69 [0.57, 0.79] and the AUC in the Erho data for predicting metastatic recurrence was 0.61 [0.57, 0.65].

[0316] Evaluation of the Final Model in Breast Cancer Data Sets

[0317] The results of evaluating the 70 gene signature in three breast cancer data sets is described below:
[0318] 1. Data set retrieved from Gene Expression Omnibus database, accession number GSE2034
   [0319] a. 209 Node negative ER positive patients
   [0320] b. Endpoint: Time to relapse
      [0321] i. Hazard ratio=1.24 [0.80, 1.92] (Kaplan Meier is shown in FIG. 9)
      [0322] ii. AUC for predicting relapse=0.62; p=0.002 (ROC curve shown in FIG. 10)
[0323] 2. Data set retrieved from Gene Expression Omnibus database, accession number GSE7390
   [0324] a. 134 Node negative ER positive patients
   [0325] b. Endpoint 1: relapse free survival (RFS)
      [0326] i. Hazard ratio=1.74 [1.04, 2.93] (Kaplan Meier is shown in FIG. 11)
   [0327] c. Endpoint 2: distant metastasis free survival (DMFS)
      [0328] i. Hazard ratio=2.01 [1.02, 3.96] (Kaplan Meier is shown in FIG. 12)
   [0329] d. Endpoint 3: overall survival (OS)
      [0330] i. Hazard ratio=2.54 [1.24, 5.18] (Kaplan Meier is shown in FIG. 13)
[0331] 3. Data set retrieved from Gene Expression Omnibus database, accession number GSE2990
   [0332] a. 149 ER positive patients
   [0333] b. Endpoint 1: relapse free survival (RFS)
      [0334] i. Hazard ratio=1.91 [1.17, 3.09] (Kaplan Meier is shown in FIG. 14)
   [0335] c. Endpoint 2: distant metastasis free survival (DMFS)
      [0336] i. Hazard ratio=2.37 [1.26, 4.44] (Kaplan Meier is shown in FIG. 15)

### REFERENCES

[0337] 1. Irizarry R A, Bolstad B M, Collin F, Cope L M, Hobbs B, Speed T P. Summaries of Affymetrix GeneChip probe level data. Nucleic acids research 2003; 31:e15.
[0338] 2. Tibshirani R, Walther G, Hastie T. Estimating the number of clusters in a data set via the gap statistic. J Roy Stat Soc B 2001; 63:411-23.
[0339] 3. Ward J H. Hierarchical Grouping to Optimize an Objective Function. Journal of the American Statistical Association 1963; 58:236-&.
[0340] 4. Ashburner M, Ball C A, Blake J A, et al. Gene ontology: tool for the unification of biology. The Gene Ontology Consortium. Nature genetics 2000; 25:25-9.
[0341] 5. Cho R J, Huang M X, Campbell M J, et al. Transcriptional regulation and function during the human cell cycle. Nature genetics 2001; 27:48-54.
[0342] 6. Benjamini Y, Hochberg Y. Controlling the False Discovery Rate—a Practical and Powerful Approach to Multiple Testing. J Roy Stat Soc B Met 1995; 57:289-300.

### Example 2—Confirmation of Effectiveness of all Probesets

[0343] Purpose:

[0344] The purpose of this analysis is to evaluate the performance of the 70 gene signature when a random probeset per gene is selected. This is to provide evidence of the importance of certain probesets associated to the signature genes.

[0345] Data:

[0346] Table 26 outlines the number of probesets available per signature gene. The table shows that the number of probesets that can be selected per gene varies from 1 to a maximum of 21 probesets per gene.

TABLE 26
Number of probesets available per signature gene

| Entrez | Signature | Signature | Weight | Rank by | # |
|---|---|---|---|---|---|
| Gene ID | Weight | Bias | (abs) | Weight | Probesets |
| 827 | −0.01090 | 4.44087 | 0.01090 | 1 | 1 |
| 7060 | −0.00963 | 6.91259 | 0.00963 | 2 | 1 |
| 5354 | −0.00889 | 4.38357 | 0.00889 | 3 | 2 |
| 4489 | −0.00868 | 6.74796 | 0.00868 | 4 | 2 |
| 406988 | −0.00828 | 7.21525 | 0.00828 | 5 | 4 |
| 6406 | −0.00793 | 4.23042 | 0.00793 | 6 | 1 |
| 84870 | −0.00730 | 4.29317 | 0.00730 | 7 | 2 |
| 50636 | −0.00716 | 6.52255 | 0.00716 | 8 | 5 |
| 5121 | −0.00714 | 7.62176 | 0.00714 | 9 | 1 |
| 27063 | −0.00692 | 5.92831 | 0.00692 | 10 | 1 |
| 4604 | −0.00684 | 4.57432 | 0.00684 | 11 | 8 |
| 4316 | −0.00684 | 6.75672 | 0.00684 | 12 | 1 |
| 12 | −0.00683 | 5.74546 | 0.00683 | 13 | 3 |
| 6401 | −0.00681 | 5.97768 | 0.00681 | 14 | 1 |
| 3852 | −0.00640 | 6.08049 | 0.00640 | 15 | 1 |
| 4057 | −0.00640 | 6.49726 | 0.00640 | 16 | 3 |
| 57481 | −0.00638 | 3.55997 | 0.00638 | 17 | 1 |
| 25907 | −0.00631 | 8.06342 | 0.00631 | 18 | 1 |
| 7538 | −0.00627 | 9.96083 | 0.00627 | 19 | 1 |
| 2354 | −0.00611 | 6.95494 | 0.00611 | 20 | 4 |
| 50652 | −0.00610 | 5.26234 | 0.00610 | 21 | 8 |
| 79054 | −0.00606 | 4.86579 | 0.00606 | 22 | 14 |
| 9232 | 0.00602 | 4.71269 | 0.00602 | 23 | 2 |
| 283194 | −0.00595 | 4.98038 | 0.00595 | 24 | 18 |
| 9506 | −0.00584 | 7.07391 | 0.00584 | 25 | 1 |
| 79689 | −0.00568 | 8.10530 | 0.00568 | 26 | 4 |
| 130733 | −0.00565 | 7.59453 | 0.00565 | 27 | 1 |
| 2920 | −0.00560 | 8.92898 | 0.00560 | 28 | 1 |
| 9955 | −0.00559 | 4.23278 | 0.00559 | 29 | 3 |
| 2138 | −0.00558 | 5.50428 | 0.00558 | 30 | 5 |
| 340419 | −0.00556 | 3.92242 | 0.00556 | 31 | 2 |
| 5317 | −0.00555 | 5.91219 | 0.00555 | 32 | 2 |
| 4588 | −0.00552 | 6.64004 | 0.00552 | 33 | 1 |
| 5179 | −0.00551 | 4.51486 | 0.00551 | 34 | 2 |
| 1672 | −0.00540 | 6.82549 | 0.00540 | 35 | 2 |
| 84889 | −0.00539 | 4.64900 | 0.00539 | 36 | 1 |
| 693163 | −0.00536 | 5.08739 | 0.00536 | 37 | 1 |
| 51050 | −0.00526 | 4.85872 | 0.00526 | 38 | 6 |
| 101928017 | −0.00526 | 6.06588 | 0.00526 | 39 | 1 |
| 5166 | −0.00525 | 4.17409 | 0.00525 | 40 | 12 |
| 644844 | −0.00521 | 5.18357 | 0.00521 | 41 | 1 |
| 5054 | −0.00519 | 6.69187 | 0.00519 | 42 | 6 |
| 29951 | −0.00515 | 4.75233 | 0.00515 | 43 | 4 |
| 7739 | −0.00511 | 6.90054 | 0.00511 | 44 | 1 |
| 152 | −0.00505 | 7.07838 | 0.00505 | 45 | 1 |
| 563 | −0.00502 | 8.19118 | 0.00502 | 46 | 3 |
| 7083 | 0.00497 | 5.58133 | 0.00497 | 47 | 1 |
| 23784 | −0.00496 | 4.82498 | 0.00496 | 48 | 4 |
| 3832 | 0.00493 | 3.91767 | 0.00493 | 49 | 2 |
| 9076 | −0.00492 | 4.96028 | 0.00492 | 50 | 6 |
| 100616163 | −0.00491 | 10.53645 | 0.00491 | 51 | 1 |
| 23764 | −0.00490 | 8.49795 | 0.00490 | 52 | 3 |
| 91661 | −0.00486 | 3.97633 | 0.00486 | 53 | 2 |
| 1164 | 0.00486 | 6.50398 | 0.00486 | 54 | 1 |
| 56849 | −0.00486 | 4.81933 | 0.00486 | 55 | 2 |
| 5346 | 0.00483 | 4.62939 | 0.00483 | 56 | 1 |
| 6614 | 0.00477 | 5.50375 | 0.00477 | 57 | 1 |
| 285016 | −0.00477 | 6.66460 | 0.00477 | 58 | 1 |
| 8076 | −0.00477 | 4.12918 | 0.00477 | 59 | 2 |
| 6422 | −0.00476 | 7.90126 | 0.00476 | 60 | 2 |
| 1847 | −0.00472 | 5.76268 | 0.00472 | 61 | 3 |
| 57176 | 0.00468 | 5.22346 | 0.00468 | 62 | 1 |
| 10257 | −0.00466 | 5.23038 | 0.00466 | 63 | 21 |
| 23677 | −0.00462 | 4.88271 | 0.00462 | 64 | 9 |
| 6652 | −0.00457 | 8.95841 | 0.00457 | 65 | 4 |
| 51001 | 0.00452 | 5.33420 | 0.00452 | 66 | 1 |
| 1803 | −0.00451 | 4.65975 | 0.00451 | 67 | 6 |
| 284837 | 0.00450 | 4.90531 | 0.00450 | 68 | 1 |
| 54097 | −0.00444 | 7.38807 | 0.00444 | 69 | 3 |
| 354 | −0.00442 | 10.22644 | 0.00442 | 70 | 5 |

[0347] Analysis:

[0348] The following analysis steps were performed:
[0349] Training data matrix pre-processing (n=126 samples)
   [0350] RMA background correction
   [0351] Quantile normalisation
   [0352] RMA summary
[0353] Generate signature scores for training samples using a random probeset which is annotated to each signature gene, 1000 times
[0354] Calculate AUC performance using the signature scores with respect to the subtype labels
[0355] Min(AUC)=0.9964 & Max(AUC)=1.00
[0356] This indicates that all probesets are effective in the signature for identifying the subtype

[0357] For completeness, it is noted that the random selection of probeset per signature gene will only be applicable for signature genes with >1 probeset i.e. 30 of the signature genes have only 1 probeset per gene, so for these genes, the same probeset is being selected each time.

### Example 3—Validation Study for 70 Gene Signature

### Introduction

[0358] As outlined in the earlier examples, using the transcriptional profile and hierarchical clustering of the Discovery cohort of prostate cancer samples, we have identified a distinct molecular subgroup of primary prostate cancers that clustered with metastatic disease and prostate cancers known to have concomitant metastases. This subgroup of primary tumour samples clustered with metastatic samples represented a poor prognostic population, whilst the benign like primary tumours defined a good prognostic subgroup. Functional analysis of the subgroup identified biological processes known to be involved in metastasis such as Epithelial Mesenchymal Transition (EMT) and cell migration. This cluster was hence defined as the ‘Metastatic-Like’ subgroup and for the purposes of this specification will be referred to throughout as ‘Met-like’.

[0359] We developed a 70-gene signature to prospectively identify the ‘Met-like’ subgroup of patients. This 70-gene assay can be used to prospectively assess disease progression from a primary tumour, to determine the likelihood of disease recurrence and/or metastatic progression. We have also previously shown that the 70-gene signature also displays good performance in heterogeneity studies, maintaining subgroup detection and signature score stability.

[0360] We have also demonstrated the prognostic significance of this molecular subgroup using the 70-gene signature in three independent in silico datasets with different clinical endpoints. In the Glinksy dataset (79 prostate cancer cases), the signature showed a good discrimination of biochemical recurrence endpoint with a statistically significant AUC=0.69 [0.57-0.79], p=0.0032 (Glinsky et al 2004). Also in the Erho dataset (545 prostate cancer cases), a statistically significant modest discrimination was observed with the signature for classifying patients metastatic recurrence endpoint (AUC 0.612 [0.569-0.653], p<0.0001) (Erho et al 2013). Finally, in the Taylor dataset, the signature had statistically significant association with patients time to metastatic recurrence (HR=6.32 [1.98-20.20], p<0.0001) and time to biochemical recurrence with HR 3.76 [1.70-8.34], p<0.0001 (Taylor et al 2010). Importantly, the metastatic biology subgroup has also been shown to predict poor outcome as identified by disease recurrence following surgical removal of the prostate independent of known prognostic factors such as Gleason score.

[0361] The identification of prostate cancer patients at high risk of recurrence following curative surgery or radiation is a key clinical requirement to identify those men that should receive adjuvant chemotherapy or radiation treatment whilst avoiding unnecessary interventions and side-effects in those who do not require further treatment. Based on this, the ability and performance of our 70-gene assay in identifying this high-risk population of patients required comprehensive clinical validation in independent cohorts of clinical prostate samples, either resections following curative surgery or biopsy specimens following curative radiotherapy.

[0362] Objectives

[0363] To further assess the performance of the prostate prognostic 70-gene assay in primary prostate resections.

[0364] To clinically validate the prostate prognostic 70-gene assay in an independent cohort of primary localised prostate cancer resections with the ability to identify a subgroup of prostate cancer patients at increased risk of developing biochemical recurrence and/or metastatic disease progression following surgery with curative intent.

[0365] To assess the performance of the prostate prognostic 70-gene assay in prostate biopsies in comparison to resection specimens.

[0366] To clinically validate the prostate prognostic 70-gene assay in an independent cohort of primary prostate biopsies with the ability to identify a subgroup of prostate cancer patients at increased risk of developing biochemical recurrence and/or metastatic disease progression following radiation treatment.

[0367] Materials & Methods

[0368] Processing and clinical validations of the 70 gene prognostic assay was performed in a blinded and randomised manner to avoid technical or biological confounding in the expression data which could have the potential to compromise data quality, integrity and validation objectives.

[0369] Prostate Cancer Tumour Material

[0370] This study performed gene expression analysis of two separate cohort of prostate cancer specimens. The first validation cohort was collected internally by Almac Diagnostics and included 349 prostate resection FFPE tissue samples obtained from four clinical sites; University College Dublin (62 samples), Wales Cancer Bank (100 samples), University of Surrey (41 samples) and University Hospital of Oslo (146 samples). This cohort consisted of samples across three key clinical groups, Non-recurrence patients (189 samples), Biochemical recurrence (also referred to as PSA recurrence) patients (112 samples) and Metastatic progression patients (48 samples). The resection dataset incorporated samples were collected based on the following inclusion criteria:
[0371] Clinical T-stage T1a-T3c (NXMO at diagnosis)
[0372] Received radical prostatectomy surgery with curative intent
[0373] Not received neo-adjuvant hormone or therapy treatments
[0374] Patients within the non-recurrence group must not have received adjuvant treatment
[0375] 3-5 years clinical follow up data available

[0376] Demographic, clinical and pathological variables utilised for the data analysis of the prostate resection cohort is summarised in Table 27.

[0377] The second validation cohort was collected in collaboration with the QUB as part of the FASTMAN Research Group and included 312 prostate biopsy FFPE tissue samples. This cohort consisted of 60 patient failures which incorporated 58 Biochemical recurrence, 24 Metastatic progression and 18 Castrate Resistant Prostate Cancer (CRPC). The biopsy dataset incorporated samples were collected based on the following inclusion criteria:
[0378] Clinical T-stage T1a-T3c (NXMO at diagnosis)
[0379] Received radiotherapy with curative intent
[0380] 3-5 years clinical follow up data available

[0381] Demographic, clinical and pathological variables utilised for the data analysis of the prostate biopsy cohort is summarised in Table 28.

[0382] Ethical approval for the sample acquisition and dataset analysis as validation of the prostate prognostic assay was obtained from the East of England Research Ethics Committee (Ref: 14/EE/1066).

[0383] Gene Expression Profiling of Prostate Cancer Samples

[0384] Prior to sample profiling, clinical samples were randomized into RNA extraction batches and re-randomised into cDNA amplification processing batches using a list of pre-defined factors i.e. Clinical T-stage, PSA, Gleason, Age and Response. Clinical site factor was also included for validation 1. A further randomization of reagents, equipment and operators was performed prior to sample processing.

[0385] All samples were centrally pathology reviewed (Prof E. Kay RCSI) and marked-up for macrodissection based on the tumour area with the most dominant Gleason grade. For resection samples 2×10 μm sections were processed whereas for biopsy samples 4×5 μm sections were used for profiling. Total RNA was extracted from macrodissected FFPE tissue using the Roche High Pure RNA Paraffin Kit (Roche Diagnostics GmbH, Mannheim, Germany). RNA was converted into complementary deoxyribonucleic acid (cDNA), which was subsequently amplified and converted into single-stranded form using the SPIA® technology of the WT-Ovation™ FFPE RNA Amplification System V3 (NuGEN Technologies Inc., San Carlos, Calif., USA). The amplified single-stranded cDNA was then fragmented and biotin labelled using the FL-Ovation™ cDNA Biotin Module V3 (NuGEN Technologies Inc.). The fragmented and labelled cDNA was then hybridised to the Almac Prostate Cancer DSA™. Almac's Prostate Cancer DSA™ research tool has been optimised for analysis of FFPE tissue samples, enabling the use of valuable archived tissue banks. The Almac Prostate Cancer DSA™ research tool is an innovative microarray platform that represents the transcriptome in both normal and cancerous prostate tissues. Consequently, the Prostate Cancer DSA™ provides a comprehensive representation of the transcriptome within prostate disease and tissue setting, not available using generic microarray platforms. Arrays were scanned using the Affymetrix Genechip® Scanner 7G (Affymetrix Inc., Santa Clara, Calif.).

[0386] Process Controls

[0387] Stratagene Universal Human Reference (UHR) samples and ES-2 cell line material were used as process controls within each processing batch as a standard measure during profiling of clinical cohorts. The UHR control is designed to be used as a universal reference RNA for microarray profiling experiments. These controls have been generated from pooling equal quantities of DNase treated cell line RNA to make a control RNA pool. The ES-2 cell line is a human clear cell carcinoma cell line representing ovarian cancer, established from an ovarian surgical tumour. The ES-2 cell line is characterised by a fibroblast morphology and cultures as an adherent cell line. Cells are maintained in McCoy's 5a Medium Modified with 10% Foetal Calf Serum (FCS), with a doubling time of approximately 24 hours. Due to their adherent properties and their fast doubling time these cells are ideal for bulking up as standard cell line controls. Approximately 1×10⁶ ES-2 cells were pelleted and fixed overnight prior to processing as a Formalin Fixed Paraffin Embedded (FFPE) tissue block. One 10 μm section of the prepared ES-2 cell line FFPE block was utilised for RNA extraction prior to downstream profiling as a Prostate Metastatic assay specific processing control.

[0388] Data Preparation and QC

[0389] A continual QC assessment of samples during sample processing was performed. Samples with RNA and cDNA concentrations were taken forward for microarray profiling i.e. minimum of 12.5 ng/ul for RNA concentration and minimum of 140 ng/ul for cDNA concentration.

[0390] Microarray data quality was assessed continuously throughout the profiling of these cohorts on a batch by batch basis, and also cumulatively after the completion of profiling to exclude poor quality samples prior to analysis. Samples were pre-processed using the Robust Multi-Array (RMA) average methodology (Irizarry et al. 2003). The QC assessment comprised a combination of the following quality metrics:
[0391] Array Image Analysis: Array data was examined to identify any image artefacts
[0392] GeneChip QC: Percent present (% P), average signal absent, scale factor, average background and raw Q. Samples with a % P<15% were deemed QC fail
[0393] Principal Component Analysis: Hotelling T2 and residual residual Q method was used to identify sample outliers at the expression level
[0394] Intensity Distribution Analysis: Kolmogorov-Smirnov statistic (Massey. 1951) used to examine the intensity distribution of the samples and identify outliers

[0395] Pre-defined limits of acceptance for Prostate assay specific cell line ES-2 were monitored using statistical process control (SPC) charts.

[0396] Generation of Signature Scores

[0397] Samples were pre-processed on a per sample basis using the refRMA (Irizarry et al. 2003) pre-processing model generated during the development of the 70 gene assay. Ensemble version 75 was used to annotate the probe sets to the corresponding Entrez Gene ID. Probe set expression was summarised to an Entrez Gene ID level using the median value (and excluding anti-sense probe sets). Assay scores were calculated using the following formula from the partial least squares model:

$$Signature Score = {\sum }_{i} {w}_{i} \times ( {x}_{i} - {b}_{i} ) + k$$

[0398] Where wᵢ is the weight of each entrez gene, xᵢ is the gene expression, bᵢ is the entrez gene specific bias and k=0.4365 (Table 29). Assay calls were assigned based upon predefined cut-off for all samples Samples with a continuous signature result >cut-off were labelled ‘assay positive’ otherwise ‘assay negative’.

[0399] Univariate and Multivariate Analysis

[0400] Time to event (survival) analysis using time to biochemical recurrence (BCR) and time to metastatic disease was performed to evaluate the prognostic effects of the 70 gene prognostic assay. The survival distributions of patient groups defined by assay status (positive or negative) are visualized using Kaplan-Meier (KM) survival curves.

[0401] The Cox proportional hazards regression model was used to assess 70 gene assay status and survival (BCR and Metastatic disease). The hazard ratio (HR) was used to quantify the effect (association) of assay status with survival endpoints. In addition to the univariate (unadjusted) analysis, the multivariable (adjusted) Cox model was used to assess the effect of the assay status (positive or negative) on BCR and Metastatic disease, adjusting for PSA at diagnosis, patient age and Gleason score on survival outcome. All estimated effects are reported with 95% confidence intervals from an analysis in which the assay and these standard prognostic factors were included, regardless of their significance. Interpretation of estimated parameters from Cox proportional hazards test and the level of significance, the goodness of fit of the fitted model was investigated including checking the fulfilment of the proportional hazards assumption (Gramsbsch & Therneau, 1994).

[0402] Multivariable (adjusted) Cox model was also used to assess the effect of the assay status (positive or negative) on BCR and Metastatic disease, adjusting for CAPRA score (Cooperberg et al. 2006). CAPRA scores for each sample were determined using PSA, Biopsy Gleason score, clinical T-stage, percentage of positive biopsy cores and age.

[0403] All tests of statistical significance were 2-sided at 5% level of significance. Statistical analysis was performed using MedCalc version 13.

[0404] Results

[0405] The 70-Gene Signature Predicts Time to Biochemical Recurrence of the ‘Met-Like’ Subgroup in the Resection Validation Cohort

[0406] Utilising 5-10 year clinical follow up data, univariate survival analysis was performed on the 322 samples which passed microarray data QC to assess the performance of the 70-gene signature at predicting time to biochemical recurrence in the resection dataset following surgery. The Kaplan-Meier survival curve shows a significant association of the 70-gene signature at predicting earlier time to recurrence (months) of the ‘Met-like’ subgroup (blue) in comparison to the Non Met-like samples (green). This suggests that the samples within the ‘Met-like’ subgroup have an increased risk of developing biochemical disease recurrence following radical prostatectomy surgery with curative intent (HR=1.74 [1.18-2.56]; p=0.0009) (FIG. 16). Multivariate analysis of the dataset was performed to assess the performance of the 70-gene signature at predicting biochemical recurrence, independent of known clinical prognostic factors including age at surgery, PSA levels at diagnosis and combined Gleason score. Considering these prognostic factors, the prostate prognostic 70-gene signature was significantly associated with predicting biochemical recurrence independent of age, PSA and Gleason grade (both <7 and >7) (HR 1.65 [1.16-2.34]; p=0.0055) (Table 30a).

[0407] The 70-Gene Signature Predicts Time to Metastatic Disease Progression of the ‘Met-Like’ Subgroup in the Resection Validation Cohort

[0408] Next using the 5-10 year clinical follow up data, univariate survival analysis was also performed on the 322 samples which passed microarray data QC to assess the performance of the 70-gene signature at predicting time to metastatic progression either local or distant sites, in the resection dataset following surgery. Similarly to biochemical recurrence, the Kaplan-Meier survival curve shows a significant association of the 70-gene signature at predicting metastatic progression of the ‘Met-like’ subgroup (blue) in comparison to the Non Met-like samples (green). This suggests that the patients within the ‘Met-like’ subgroup have an increased risk of developing metastatic disease progression following radical prostatectomy surgery with curative intent (HR=3.60 [1.81-7.13]; p<0.0001) (FIG. 17). Multivariate analysis of the resection dataset was investigated to assess the performance of the 70-gene signature at predicting metastatic progression, independent of known clinical prognostic factors including age at surgery, PSA levels at diagnosis and combined Gleason score. The prostate prognostic 70-gene signature scores of the ‘Met-like’ subgroup were shown to be significantly associated with predicting metastatic disease progression independent of age, PSA and Gleason grade (both <7 and >7) (HR 3.50 [1.95-6.27]; p<0.0001), hence supporting that patients within this group are ‘high-risk’ for progression (Table 30b). Interestingly, the 70-gene signature appears to show better performance as a prognostic factor as opposed to age, PSA and Gleason <7 for predicting metastatic disease (Table 30b).

[0409] The 70-Gene Signature Predicts Time to Biochemical Recurrence of the ‘Met-Like’ Subgroup in the Biopsy Validation Cohort

[0410] Univariate survival analysis was performed using the collated 5-10 year follow up clinical data on the 322 samples to assess the performance of the 70-gene signature at predicting time to biochemical recurrence in the biopsy dataset following radiotherapy with curative intent. The Kaplan-Meier survival curve shows a significant association of the 70-gene signature at predicting earlier time to recurrence (months) of the ‘Met-like’ subgroup (blue) in comparison to the Non Met-like samples (green). As with the resection dataset, this suggests that the patients within the ‘Met-like’ subgroup have an increased risk of developing biochemical disease recurrence following radical radiotherapy with curative intent (HR=2.18 [1.14-4.17]; p=0.0042) (FIG. 18). Multivariate analysis of the dataset was then performed to assess the performance of the 70-gene signature at predicting biochemical recurrence, independent of other commonly used prognostic factors including age at diagnosis, PSA levels at diagnosis and combined Gleason score. The prostate prognostic 70-gene signature of the ‘Met-like’ group was significantly associated with predicting biochemical recurrence independent of age, PSA and Gleason grade (both <7 and >7) (HR 1.96 [1.11-3.48]; p=0.0220), indicating that the patients within this subgroup are at increasing risk of developing biochemical recurrence (Table 31a). Of note, this data suggests that no other variable within the covariate analysis is significantly associated with identifying the increased risk of disease recurrence in the ‘Met-like’ subgroup (Table 31a).

[0411] The 70-Gene Signature Predicts Time to Metastatic Disease Progression of the ‘Met-Like’ Subgroup in the Biopsy Validation Cohort

[0412] Following this, univariate survival analysis was also performed on the 248 QC pass samples to determine the performance of the 70-gene signature at predicting time to metastatic progression either local or distant sites, in the biopsy dataset following surgery. As with biochemical recurrence, the Kaplan-Meier survival curve shows a significance of the 70-gene signature at predicting metastatic progression of the ‘Met-like’ subgroup (blue) in comparison to the Non Met-like samples (green). This suggests that the patients within the ‘Met-like’ subgroup have an increased risk of developing metastatic disease progression following radical radiotherapy treatment with curative intent (HR=3.50 [1.28-9.56]; p=0.0017) (FIG. 19). Multivariate analysis of the biopsy dataset was performed to further assess the performance of the 70-gene signature at predicting metastatic progression, independent of other known clinical prognostic factors including age at diagnosis, PSA levels at diagnosis and combined Gleason score. The prostate prognostic 70-gene signature was shown to be significantly associated with predicting metastatic disease progression independent of age, PSA and Gleason grade (both <7 and >7) (HR 2.66 [1.10-6.40]; p<0.0304) (Table 31b). Similarly to the assessment of biochemical recurrence in the biopsy cohort, this data suggests that no other variable within the covariate analysis is significantly associated with identifying the increased risk of disease recurrence in the ‘Met-like’ subgroup (Table 31b).

[0413] Collectively, the data for both the resection and biopsy cohorts support the 70-gene signature as a prognostic assay in the field of prostate cancer which could be implemented as a patient stratifier to identify prostate cancer patients from early detection that may be at increased risk of developing more aggressive high-risk disease within 3-5 years of initial treatment.

[0414] Performance of the 70-Gene Signature as a Prognostic Tool for Biochemical and Metastatic Recurrence in Comparison to the CAPRA Scoring System

[0415] The CAPRA and CAPRA-S scoring system for prostate cancer is a multivariate prognostic tool which has been developed to predict risk of disease recurrence using pre-operative biopsy material (CAPRA) and post-operative resected material (CAPRA-S). The scoring system can provide outcome based on a range of risk levels and is calculated on a points system taking into account PSA levels, patient age, Gleason grade and clinical T-stage whereby the higher the cumulative points the greater the risk of disease recurrence (Cooperberg et al 2005). CAPRA-S used to assess risk and prediction post-surgery also includes scoring for additional clinical factors including seminal vesicle invasion (SVI), extracapsular extension (ECE), lymph node invasion (LNI) and surgical margins. The only additional factor utilised in the CAPRA scoring system for biopsy material is the % of positive cores > or <34%. Firstly, we investigated the prognostic performance of the novel 70-gene signature in comparison to the CAPRA-S scoring system. In multivariate analysis only the CAPRA-S scoring was significantly associated with biochemical recurrence, (HR=1.36 [1.28-1.45], p<0.0001) however both the metastatic assay and CAPRA-S scoring were significantly associated with the development of metastatic disease (HR 2.53 [1.40-4.60]; p=0.0024 and HR=1.43 [1.28-1.61], p<0.0001 (Table 32a and 32b). These data indicate that the metastatic signature provided additional information to the CAPRA-S scoring system.

[0416] Finally we also interrogated the prognostic performance of our 70-gene signature in comparison to the CAPRA scoring system. Only the 70-gene signature was significantly associated with prognostic outcome and identifying the high-risk ‘Met-like’ subgroup at increased chance of developing biochemical recurrence in the biopsy dataset (HR 2.05 [1.18-3.59]; p=0.0119) whilst the CAPRA score showing no significance independent of the prognostic assay (Table 33a). Similarly, in the biopsy validation cohort, only the 70-gene signature was significantly associated with prognostic outcome and identifying the high-risk ‘Met-like’ subgroup at increased chance of developing metastatic disease progression (HR 3.39 [1.44-7.97]; p=0.0054) (Table 33b). In sum, the comparison of the 70-gene signature to the CAPRA scoring system shows better performance in biopsy material and provides further evidence for the use of the 70-gene signature as a prognostic assay within the field of prostate cancer.

### DISCUSSION

[0417] Approximately 35% of primary localised prostate cancer progress to a more aggressive and recurrent disease state despite radical treatment such as surgery or external beam radiotherapy, whilst a large number of primary cancers will not progress to clinically significant disease. With this in mind, a great clinical question within the field is how to easily distinguish these subgroups of patients to allow patient stratification which could ultimately determine which patients may require further and more intense treatment regimens and which patients could avoid the toxic less tolerated therapies if unnecessary. It is thought that a potential approach to stratification is the development of compound prognostics factors which is based on both a combination of single prognosticators and their associations or alternatively gene expression profiles from DNA-microarray profiling (Buhmeida et al 2006).

[0418] Utilising this approach, Almac Diagnostics have developed and validated a 70-gene signature as a potential prognostic assay which could promote the identification of a high-risk prostate cancer population at increased risk of developing more aggressive disease, either biochemical or metastatic recurrence. The data within this specification strongly supports the performance of the prostate prognostic assay in both resection and biopsy material. In two independent clinical validation cohorts of primary prostate resections and biopsies, the 70-gene signature can accurately identify a subgroup of patients with a ‘Met-like’ biology and a greater risk of biochemical disease relapse or metastatic disease within 3-5 years of follow up. The subgroup of patients with a ‘Met-like’ biology are considered the population who should receive additional treatment post-surgery, such as adjuvant hormone therapy, radiotherapy or treatment with taxanes. Conversely to this, the patients identified within the Non Met-like subgroup should be spared from further treatment and monitored throughout standard clinical follow-up. It is evident this prognostic assay has two clear clinical utilities:

[0419] Predicting a subset of a defined prostate cancer cohort from resection material who may progress with high-risk disease (either biochemical recurrence or metastatic progression) following radical prostatectomy surgery with curative intent.

[0420] Predicting a subset of a defined prostate cancer cohort from biopsy material who may progress with high-risk disease (wither biochemical or metastatic progression) following radical radiotherapy with curative intent.

[0421] Table Legends

[0422] Table 28—Summary of demographic, clinical and pathological variables considered for analysis of the internal resection cohort. Table outlines total number of patients, the median and range of age at surgery (years), time to recurrence (months), pre-operative PSA levels (ng/ml) and the number (%) of patients from each of the four clinical sites, within each recurrence subgroup, associated with each of the representative Gleason grades, within each pathological T-stage subgroup, with lymph node invasion (LNI), seminal vesicle invasion (SVI), extracapsular extension (ECE) and patients with negative, diffuse or focal surgical margins.

[0423] Table 29—Summary of demographic, clinical and pathological variables considered for analysis of the FASTMAN biopsy cohort. Table outlines total number of patients, the median and range of age at diagnosis (years), time to recurrence (months), PSA levels at diagnosis (ng/ml) and the number (%) of patients, within each recurrence subgroup, associated with each of the representative Gleason grades and within each pathological T-stage subgroup.

[0424] Table 30—Genes, weightings and bias of the 70-gene signature.

[0425] Table 31—A) Multivariate analysis of the 70-gene signature in the internal resection cohort for biochemical recurrence, demonstrating assay performance independent of other prognostic clinical factors including age at surgery, PSA levels and combined Gleason score. P-values, hazard ratios (HR) and 95% confidence intervals (CI) of the HR are outlined within the table. P-values highlighted in red indicate statistical significance. B) Multivariate analysis of the 70-gene signature in the internal resection cohort for metastatic disease progression, demonstrating assay performance independent of other prognostic clinical factors including age at surgery, PSA levels and combined Gleason score. P-values, hazard ratios (HR) and 95% confidence intervals (CI) of the HR are outlined within the table. P-values highlighted in red indicate statistical significance.

[0426] Table 32—A) Multivariate analysis of the 70-gene signature in the FASTMAN biopsy cohort for biochemical recurrence, demonstrating assay performance independent of other prognostic clinical factors including age at diagnosis, PSA levels and combined Gleason score. P-values, hazard ratios (HR) and 95% confidence intervals (CI) of the HR are outlined within the table. P-values highlighted in red indicate statistical significance. B) Multivariate analysis of the 70-gene signature in the FASTMAN biopsy cohort for metastatic disease progression, demonstrating assay performance independent of other prognostic clinical factors including age at diagnosis, PSA levels and combined Gleason score. P-values, hazard ratios (HR) and 95% confidence intervals (CI) of the HR are outlined within the table. P-values highlighted in red indicate statistical significance.

[0427] Table 33—A) Covariate analysis of the 70-gene signature in comparison to the CAPRA-S scoring system within the internal resection cohort for biochemical recurrence, demonstrating assay performance against alternative prognostic scoring assays. P-values, hazard ratios (HR) and 95% confidence internals (CI) of the HR are outlined for each comparison within the table. P-values highlighted in red indicate statistical significance. B) Covariate analysis of the 70-gene signature in comparison to the CAPRA-S scoring system within the internal resection cohort for metastatic disease progression, demonstrating assay performance against alternative prognostic scoring assays. P-values, hazard ratios (HR) and 95% confidence internals (CI) of the HR are outlined for each comparison within the table. P-values highlighted in red indicate statistical significance.

[0428] Table 34—A) Covariate analysis of the 70-gene signature in comparison to the CAPRA scoring system within the FASTMAN biopsy cohort for biochemical recurrence, demonstrating assay performance against alternative prognostic scoring assays. P-values, hazard ratios (HR) and 95% confidence internals (CI) of the HR are outlined for each comparison within the table. P-values highlighted in red indicate statistical significance. B) Covariate analysis of the 70-gene signature in comparison to the CAPRA scoring system within the FASTMAN biopsy cohort for metastatic disease progression, demonstrating assay performance against alternative prognostic scoring assays. P-values, hazard ratios (HR) and 95% confidence internals (CI) of the HR are outlined for each comparison within the table. P-values highlighted in red indicate statistical significance.

TABLE 28
Demographic and Clinical variable summary
of Resection validation cohort

| Variable | | Validation Cohort | |
|---|---|---|---|
| Patient Number | No. of Patients | 322 | |
| Clinical Site - n (%) | UCD | 61 | (19) |
| | Oslo | 142 | (44) |
| | Surrey | 34 | (11) |
| | WCB | 85 | (26) |
| Age at Surgery | Median (range), Years | 62 | (41-75) |
| Recurrence Event - n (%) | Non-recurrence | 172 | (53) |
| | Biochemical recurrence | 103 | (32) |
| | Metastatic recurrence | 47 | (15) |
| Time to Recurrence - | Biochemical recurrence | 12 | (1-100) |
| Median (range) | Metastatic recurrence | 6 | (3-63) |
| Pre-operative PSA | Median (range), ng/ml | 8.4 | (2-253) |
| Gleason score - n (%) | <6 | 2 | (1) |
| | 6 | 67 | (21) |
| | 7 | 197 | (61) |
| | 8-10 | 55 | (17) |
| Pathological | T1 | 1 | (0.5) |
| T-stage - n (%) | T2 | 174 | (54) |
| | T3 | 146 | (45) |
| | T4 | 1 | (0.5) |
| Lymph Node | Yes | 16 | (5) |
| Invasion - n (%) | No | 105 | (33) |
| | Unknown | 201 | (62) |
| Seminal Vesicle | Yes | 62 | (19) |
| Invasion - n (%) | No | 260 | (81) |
| Extracapsular | Yes | 97 | (30) |
| Extension - n (%) | No | 190 | (59) |
| | Unknown | 35 | (11) |
| Surigcal | Negative | 132 | (41) |
| Margins - n (%) | Focal | 40 | (12) |
| | Diffuse | 65 | (20) |
| | Unknown | 85 | (27) |

TABLE 29
Demographic and Clinical variable
summary of Biopsy validation cohort

| Variable | | Validation Cohort | |
|---|---|---|---|
| Patient Number | No. of Patients | 248 | |
| Clinical Site - n (%) | Beifast | 248 | (100) |
| Age at Diagnosis | Median (range), Years | 68 | (48-79) |
| Recurrence Event - n (%) | Non-recurrence | 170 | (68) |
| | Biochemical recurrence | 56 | (23) |
| | Metastatic recurrence | 22 | (9) |
| Time to Recurrence - | Biochemical recurrence | 82 | (10-117) |
| Median (range) | Metastatic recurrence | 86.5 | (10-128) |
| PSA at Diagnosis | Median (range), ng/ml | 17.95 | (3.2-222.3) |
| Gleason Grade - n (%) | 6 | 41 | (17) |
| | 7 | 100 | (40) |
| | 8-10 | 107 | (43) |
| Pathological | T1 | 51 | (21) |
| T-stage - n (%) | T2 | 76 | (31) |
| | T3 | 92 | (36) |
| | T4 | 4 | (2) |
| | Unknown | 25 | (10) |

TABLE 30
Genes, weightings and bias of the 70-gene signature

| Gene Name | Entrez Gene ID | Weight | Bias |
|---|---|---|---|
| CAPN6 | 827 | −0.010898880 | 4.440873234 |
| THBS4 | 7060 | −0.009631509 | 6.912586369 |
| PLP1 | 5354 | −0.008885735 | 4.383572327 |
| MT1A | 4489 | −0.008680747 | 6.747956978 |
| MIR205HG | 406988 | −0.008278545 | 7.215245389 |
| SEMG1 | 6406 | −0.007934619 | 4.230422622 |
| RSPO3 | 84870 | −0.007295796 | 4.293172794 |
| ANO7 | 50636 | −0.007164357 | 6.522547774 |
| PCP4 | 5121 | −0.007138975 | 7.621758138 |
| ANKRD1 | 27063 | −0.006922498 | 5.92831485 |
| MYBPC1 | 4604 | −0.006844539 | 4.574318807 |
| MMP7 | 4316 | −0.006835450 | 6.756722063 |
| SERPINA3 | 12 | −0.006830879 | 5.745461752 |
| SELE | 6401 | −0.006809804 | 5.977682143 |
| KRT5 | 3852 | −0.006402712 | 6.080493983 |
| LTF | 4057 | −0.006400452 | 6.497259991 |
| KIAA1210 | 57481 | −0.006380629 | 3.559966010 |
| FMEM158 | 25907 | −0.006312212 | 8.063421249 |
| ZFP35 | 7538 | −0.006271047 | 9.960826690 |
| FOSB | 2354 | −0.006108115 | 6.954936015 |
| PCA3 | 50652 | −0.006101922 | 5.262341585 |
| TRPM8 | 79054 | −0.006059944 | 4.865791397 |
| PTTG1 | 9232 | 0.006017344 | 4.712692803 |
| #N/A | 283194 | −0.005950381 | 4.980380941 |
| PAGE4 | 9506 | −0.005837135 | 7.073906580 |
| STEAP4 | 79689 | −0.005684812 | 8.105295362 |
| TMEM178A | 130733 | −0.00564663 | 7.59452596 |
| CXCL2 | 2920 | −0.005597719 | 8.928977514 |
| HS3ST3A1 | 9955 | −0.005593197 | 4.232781732 |
| EVA1 | 2138 | −0.005581031 | 5.504276204 |
| RSPO2 | 340419 | −0.005562783 | 3.922420794 |
| PKP1 | 5317 | −0.005553136 | 5.912186171 |
| MUC6 | 4588 | −0.005522157 | 6.640037274 |
| PENK | 5179 | −0.005505761 | 4.514855049 |
| DEFB1 | 1672 | −0.005399899 | 6.825490924 |
| SLC7A3 | 84889 | −0.005389518 | 4.649003630 |
| MIR578 | 693163 | −0.005355230 | 5.087389320 |
| PI15 | 51050 | −0.005253663 | 4.858716243 |
| UBXN10-AS1 | 101928017 | −0.005259309 | 6.065877615 |
| PDK4 | 5166 | −0.005248750 | 4.174094312 |
| PHGR1 | 644844 | −0.005207500 | 5.183571143 |
| SERPIME1 | 5054 | −0.005194886 | 6.691866284 |
| PDZRN4 | 29951 | −0.005146623 | 4.752327652 |
| ZNF185 | 7739 | −0.005105327 | 6.900544220 |
| ADRA2C | 152 | −0.005054713 | 7.078376864 |
| AZGP1 | 563 | −0.005018400 | 8.191177501 |
| TK1 | 7083 | 0.004965887 | 5.581334570 |
| POTEH | 23784 | −0.004961473 | 4.824976325 |
| KIF11 | 3832 | 0.004928774 | 3.917668501 |
| CLDN1 | 9076 | −0.004924383 | 4.960282713 |
| MIR4530 | 100616163 | −0.004907676 | 10.53645223 |
| MAFF | 23764 | −0.004901224 | 8.497945251 |
| ZNF765 | 91661 | −0.004861949 | 3.976333034 |
| CKS2 | 1164 | 0.004855890 | 6.503980715 |
| TCEAL7 | 56849 | −0.004855875 | 4.819327983 |
| PLIN1 | 5346 | 0.004830634 | 4.629391793 |
| SIGLEC1 | 6614 | 0.004772601 | 5.503752383 |
| FAM150B | 285016 | −0.004772585 | 6.664595224 |
| MFAP5 | 8076 | −0.004771653 | 4.129176546 |
| SFRP1 | 6422 | −0.004761531 | 7.901261944 |
| DUSP5 | 1847 | −0.004718060 | 5.762677834 |
| VARS2 | 57176 | 0.004675188 | 5.223455192 |
| ABCC4 | 10257 | −0.004664227 | 5.230376747 |
| SH3BP4 | 23677 | −0.004622969 | 4.882708067 |
| SORD | 6652 | −0.004573155 | 8.958411069 |
| MTERFD1 | 51001 | 0.004522466 | 5.334198783 |
| DPP4 | 1803 | −0.004505906 | 4.65974831 |
| #N/A | 284837 | 0.004502134 | 4.905312692 |
| FAM3B | 54097 | −0.004443400 | 7.388071281 |
| KLK3 | 354 | −0.004424720 | 10.226441291 |

TABLE 31
Multivariate analysis of the 70-gene signature
in the internal resection cohort for a) biochemical
recurrence and b) metastatic progression.

| | | | |
|---|---|---|---|
| Covariate | HR | 95% CI | p |

a) Biochemical Recurrence

| | | | |
|---|---|---|---|
| Prostate Metastatic Assay: Negative | 1.65 | 1.16 to 2.34 | 0.0055 |
| Gleason = “<7” | 0.59 | 0.36 to 0.97 | 0.0388 |
| Gleason = “>7” | 2.10 | 1.44 to 3.07 | 0.0001 |
| Age | 1.00 | 0.97 to 1.03 | 0.9088 |
| PSA | 1.00 | 1.00 to 1.01 | 0.0089 |

b) Metastatic Disease

| | | | |
|---|---|---|---|
| Prostate Metastatic Assay: Negative | 3.50 | 1.95 to 6.27 | <0.0001 |
| Gleason = “<7” | 0.35 | 0.11 to 1.17 | 0.0906 |
| Gleason = “>7” | 3.11 | 1.67 to 5.77 | 0.0004 |
| Age | 0.98 | 0.93 to 1.03 | 0.4039 |
| PSA | 1.01 | 0.99 to 1.02 | 0.3634 |

Abbreviations: HR, hazard ratio Assessment post-surgical.

TABLE 32
Multivariate analysis of the 70-gene signature
in FASTMAN biopsy cohort for a) biochemical
recurrence and b) metastatic progression.

| | | | |
|---|---|---|---|
| Covariate | P-value | HR | 95% CI of HR |

a) Biochemical Recurrence

| | | | |
|---|---|---|---|
| Prostate 70 Gene Call: Met-Like | 0.0220 | 1.96 | 1.11 to 3.48 |
| Age at Diagnosis | 0.1375 | 0.97 | 0.93 to 1.01 |
| PSA at Diagnosis | 0.1308 | 1.01 | 1.00 to 1.01 |
| Combined Gleason Score = “<7” | 0.1510 | 0.49 | 0.19 to 1.29 |
| Combined Gleason Score = “>7” | 0.9409 | 0.98 | 0.55 to 1.73 |

b) Metastatic Disease

| | | | |
|---|---|---|---|
| Prostate 70 Gene Call: Met-Like | 0.0304 | 2.56 | 1.10 to 5.40 |
| Age at Diagnosis | 0.7628 | 0.99 | 0.93 to 1.06 |
| PSA at Diagnosis | 0.2517 | 1.01 | 1.00 to 1.02 |
| Combined Gleason Score = “<7” | 0.3573 | 0.37 | 0.05 to 3.03 |
| Combined Gleason Score = “>7” | 0.5389 | 1.35 | 0.52 to 3.45 |

TABLE 33
Analysis and comparison of the 70-gene signature to CAPRA
scoring system in the internal resection cohort for a)
biochemical recurrence and b) metastatic progression.

| | | | |
|---|---|---|---|
| Covariate | HR | 95% CI | p |

a) Biochemical Recurrence

| | | | |
|---|---|---|---|
| Prostate Metastatic Assay: Negative | 1.34 | 0.94 to 1.90 | 0.1079 |
| CARPA-S | 1.36 | 1.28 to 1.45 | <0.0001 |

b) Metastatic Disease

| | | | |
|---|---|---|---|
| Prostate Metastatic Assay: Negative | 2.53 | 1.40 to 4.60 | 0.0024 |
| CARPA-S | 1.43 | 1.28 to 1.61 | <0.0001 |

Abbreviations: HR, hazard ratio; CAPRA-s, Cancer of the Prostate Risk Assessment post-surgical.

TABLE 34
Analysis and comparison of the 70-gene signature to CAPRA
scoring system in the FASTMAN biopsy cohort for a) biochemical
recurrence and b) metastatic progression.

| | | | |
|---|---|---|---|
| Covariate | P-value | HR | 95% CI of HR |

a) Biochemical Recurrence

| | | | |
|---|---|---|---|
| Prostate 70 Gene Call: Met-Like | 0.0119 | 2.05 | 1.18 to 3.59 |
| CAPRA Score | 0.3443 | 1.11 | 0.90 to 1.36 |

b) Metastatic Disease

| | | | |
|---|---|---|---|
| Prostate 70 Gene Call: Met-Like | 0.0054 | 3.39 | 1.44 to 7.97 |
| CAPRA Score | 0.7455 | 1.06 | 0.76 to 1.47 |

### Example 4—Core and Minimum Gene Analysis

[0429] Samples:
[0430] Internal training samples (Discovery cohort): This sample set comprised of 126 FFPE prostate resection FFPE tissue samples profiled on the Almac Prostate DSA™ microarray.
[0431] FASTMAN Biopsy Validation Cohort: This sample set was comprised of 248 prostate biopsy FFPE tissue samples collected in collaboration with the FASTMAN Research Group under the Movember Programme.
[0432] Internal Resection Validation Cohort: This sample set comprised of 322 prostate resection FFPE tissue samples collected internally by Almac Diagnostics. Samples were obtained from four clinical sites; University College Dublin (61 samples), Wales Cancer Bank (85 samples), University of Surrey (34 samples) and University Hospital of Oslo (142 samples).

[0433] Methods:

[0434] Core Gene Analysis

[0435] The purpose of evaluating the core gene set of the signature is to determine a ranking for the Entrez genes based upon their impact on performance when removed from the signature.

[0436] This analysis involved 10,000 random samplings of 10 signature Entrez genes from the original 70 signature Entrez gene set. At each iteration, 10 randomly selected signature Entrez genes were removed and the performance of the remaining 65 genes was evaluated using the endpoint to determine the impact on HR (Hazard Ratio) performance when these 10 Entrez genes were removed in the following 2 datasets:
[0437] FASTMAN Biopsy Validation Cohort—248 samples
[0438] Internal Resection Validation Cohort—322 samples

[0439] FASTMAN Biopsy Validation was evaluated using the biochemical recurrence (BCR) endpoint and Internal Resection Validation was evaluated using the metastatic recurrence (MET) endpoint. Within each of the 2 datasets, the signature Entrez genes were weighted based upon the change in HR performance (Delta HR) based upon their inclusion or exclusion. Entrez genes ranked ‘1’ have the most negative impact on performance when removed and those ranked ‘70’ have the least impact on performance when removed.

[0440] Minimum Gene Analysis

[0441] The purpose of evaluating the minimum number of Entrez genes is to determine if significant performance can be achieved within smaller subsets of the original signature.

[0442] This analysis involved 10,000 random samplings of the 70 signature Entrez genes starting at 1 Entrez gene/feature, up to a maximum of 30 Entrez genes/features. For each randomly selected feature length, the signature was redeveloped using the PLS machine learning method under CV and model parameters derived. At each feature length, all randomly selected signatures were applied to calculate signature scores for the following 2 datasets:
[0443] FASTMAN Biopsy Validation Cohort—248 samples
[0444] Internal Resection Validation Cohort—322 samples

[0445] Continuous signature scores were evaluated with outcome to determine the HR effect; FASTMAN Biopsy Validation was evaluated with BCR and Internal Resection Validation was evaluated with MET. The HR for all random signatures at each feature length was summarized and figures generated to visualize the performance over CV.

[0446] Results

[0447] Core Gene Analysis

[0448] The results for the core gene analysis of the 70 gene signature in the 2 datasets is provided in this section.
[0449] FASTMAN Biopsy Validation: Delta HR performance measured in this dataset for the 70 signature Entrez genes is shown in FIG. 20. This figure highlights the top 10 ranked Entrez genes in the signature which are the most important in retaining a good HR performance within this dataset. This ranking can also been found in Table 35 below:

| Entrez Gene | Gene | Total Delta HR | Rank |
|---|---|---|---|
| 6401 | SELE | 4.761124889 | 1 |
| 340419 | RSPO2 | 3.687852175 | 2 |
| 4489 | MT1A | 3.565744532 | 3 |
| 3852 | KRT5 | 2.45747844 | 4 |
| 563 | AZGP1 | 2.446961746 | 5 |
| 5121 | PCP4 | 2.440528148 | 6 |
| 51050 | PI15 | 2.353758149 | 7 |
| 5179 | PENK | 1.642705501 | 8 |
| 25907 | TMEM158 | 1.476987515 | 9 |
| 152 | ADRA2C | 1.4186879 | 10 |
| 50636 | ANO7 | 1.34866117 | 11 |
| 2138 | EYA1 | 1.348354023 | 12 |
| 3832 | KIF11 | 1.291035934 | 13 |
| 23677 | SH3BP4 | 1.224986822 | 14 |
| 5166 | PDK4 | 1.188342205 | 15 |
| 57481 | KIAA1210 | 1.103651804 | 16 |
| 23784 | POTEH | 1.043547171 | 17 |
| 6614 | SIGLEC1 | 0.855535152 | 18 |
| 4604 | MYBPC1 | 0.819417585 | 19 |
| 2920 | CXCL2 | 0.813780936 | 20 |
| 6406 | SEMG1 | 0.768923782 | 21 |
| 9955 | HS3ST3A1 | 0.749239331 | 22 |
| 4057 | LTF | 0.71103352 | 23 |
| 7083 | TK1 | 0.677537934 | 24 |
| 57176 | VARS2 | 0.653632853 | 25 |
| 79054 | TRPM8 | 0.506824534 | 26 |
| 29951 | PDZRN4 | 0.420605146 | 27 |
| 9506 | PAGE4 | 0.340073483 | 28 |
| 50652 | PCA3 | 0.315775741 | 29 |
| 79689 | STEAP4 | 0.266189243 | 30 |
| 1847 | DUSP5 | 0.178110535 | 31 |
| 6422 | SFRP1 | 0.138569985 | 32 |
| 693163 | MIR578 | 0.118486894 | 33 |
| 101928017 | UBXN10- | 0.068688136 | 34 |
| | AS1 | | |
| 6652 | SORD | −0.004486521 | 35 |
| 5346 | PLIN1 | −0.086533897 | 36 |
| 56849 | TCEAL7 | −0.13067584 | 37 |
| 1803 | DPP4 | −0.144066233 | 38 |
| 5317 | PKP1 | −0.164994289 | 39 |
| 354 | KLK3 | −0.166136293 | 40 |
| 54097 | FAM3B | −0.209897076 | 41 |
| 23764 | MAFF | −0.214942264 | 42 |
| 9232 | PTTG1 | −0.256777275 | 43 |
| 2354 | FOSB | −0.264910805 | 44 |
| 406988 | MIR205HG | −0.303067689 | 45 |
| 91661 | ZNF765 | −0.423012094 | 46 |
| 284837 | #N/A | −0.449656588 | 47 |
| 5054 | SERPINE1 | −0.476929578 | 48 |
| 10257 | ABCC4 | −0.490520163 | 49 |
| 644844 | PHGR1 | −0.539343141 | 50 |
| 283194 | #N/A | −0.555242337 | 51 |
| 4588 | MUC6 | −0.574748909 | 52 |
| 51001 | MTERFD1 | −0.770988555 | 53 |
| 7538 | ZFP36 | −0.842688769 | 54 |
| 1672 | DEFB1 | −1.003111116 | 55 |
| 9076 | CLDN1 | −1.074445919 | 56 |
| 130733 | TMEM178A | −1.134351 | 57 |
| 84889 | SLC7A3 | −1.153855918 | 58 |
| 7739 | ZNF185 | −1.20365806 | 59 |
| 12 | SERPINA3 | −1.443334853 | 60 |
| 827 | CAPN6 | −1.618228454 | 61 |
| 5354 | PLP1 | −1.680375803 | 62 |
| 1164 | CKS2 | −1.700995591 | 63 |
| 8076 | MFAP5 | −1.724942849 | 64 |
| 84870 | RSPO3 | −2.50110156 | 65 |
| 100616163 | MIR4530 | −2.79787323 | 66 |
| 285016 | FAM150B | −3.055488057 | 67 |
| 27063 | ANKRD1 | −4.50925449 | 68 |
| 7060 | THBS4 | −4.556568781 | 69 |
| 4316 | MMP7 | −4.78562355 | 70 |

[0450] Internal Resection Validation: Delta HR performance measured in this dataset for the 70 signature Entrez genes is shown in FIG. 2. This figure highlights the top 10 ranked Entrez genes in the signature which are the most important in retaining a good HR performance within this dataset. This ranking can also been found in Table 36 below:

| Entrez Gene | Gene | Total Delta HR | Rank |
|---|---|---|---|
| 3852 | KRT5 | 5.850910136 | 1 |
| 2354 | FOSB | 5.341991077 | 2 |
| 9232 | PTTG1 | 4.440300792 | 3 |
| 5179 | PENK | 4.359290179 | 4 |
| 340419 | RSPO2 | 3.715352525 | 5 |
| 563 | AZGP1 | 3.640373688 | 6 |
| 100616163 | MIR4530 | 3.034458226 | 7 |
| 7538 | ZFP36 | 2.900383458 | 8 |
| 4604 | MYBPC1 | 2.60456647 | 9 |
| 23764 | MAFF | 2.422195244 | 10 |
| 50652 | PCA3 | 2.343241624 | 11 |
| 50636 | ANO7 | 1.922305172 | 12 |
| 1803 | DPP4 | 1.747968953 | 13 |
| 693163 | MIR578 | 1.70934994 | 14 |
| 4057 | LTF | 1.457636816 | 15 |
| 1847 | DUSP5 | 1.441368066 | 16 |
| 7083 | TK1 | 1.432224235 | 17 |
| 101928017 | UBXN10- | 1.249812402 | 18 |
| | AS1 | | |
| 1164 | CKS2 | 1.152406332 | 19 |
| 23677 | SH3BP4 | 1.116227302 | 20 |
| 5121 | PCP4 | 1.047369238 | 21 |
| 152 | ADRA2C | 0.891075934 | 22 |
| 12 | SERPINA3 | 0.854606034 | 23 |
| 57481 | KIAA1210 | 0.762370469 | 24 |
| 3832 | KIF11 | 0.713624009 | 25 |
| 4489 | MT1A | 0.655338791 | 26 |
| 9506 | PAGE4 | 0.430978289 | 27 |
| 2138 | EYA1 | 0.384089193 | 28 |
| 91661 | ZNF765 | 0.309943842 | 29 |
| 284837 | #N/A | 0.303352744 | 30 |
| 25907 | TMEM158 | 0.247359339 | 31 |
| 6614 | SIGLEC1 | 0.202684496 | 32 |
| 9076 | CLDN1 | 0.060049481 | 33 |
| 354 | KLK3 | −0.07704205 | 34 |
| 79054 | TRPM8 | −0.07716181 | 35 |
| 5054 | SERPINE1 | −0.083069191 | 36 |
| 84889 | SLC7A3 | −0.103594879 | 37 |
| 79689 | STEAP4 | −0.262219935 | 38 |
| 9955 | HS3ST3A1 | −0.310839602 | 39 |
| 130733 | TMEM178A | −0.328948061 | 40 |
| 10257 | ABCC4 | −0.420421537 | 41 |
| 51001 | MTERFD1 | −0.427114354 | 42 |
| 5346 | PLIN1 | −0.445607269 | 43 |
| 4588 | MUC6 | −0.452261632 | 44 |
| 644844 | PHGR1 | −0.527656877 | 45 |
| 283194 | #N/A | −0.623963891 | 46 |
| 29951 | PDZRN4 | −0.672143861 | 47 |
| 57176 | VARS2 | −0.673665413 | 48 |
| 6652 | SORD | −0.711615138 | 49 |
| 7739 | ZNF185 | −0.796601532 | 50 |
| 5317 | PKP1 | −0.91761911 | 51 |
| 6401 | SELE | −0.943930367 | 52 |
| 23784 | POTEH | −0.987487576 | 53 |
| 54097 | FAM3B | −1.064799882 | 54 |
| 5354 | PLP1 | −1.065316284 | 55 |
| 6422 | SFRP1 | −1.370192928 | 56 |
| 5166 | PDK4 | −1.863810081 | 57 |
| 84870 | RSPO3 | −2.4018171 | 58 |
| 56849 | TCEAL7 | −2.455318029 | 59 |
| 51050 | PI15 | −2.502066289 | 60 |
| 6406 | SEMG1 | −2.625125175 | 61 |
| 4316 | MMP7 | −3.015001652 | 62 |
| 2920 | CXCL2 | −3.051014073 | 63 |
| 406988 | MIR205HG | −3.231330366 | 64 |
| 285016 | FAM150B | −3.602511107 | 65 |
| 27063 | ANKRD1 | −3.836256996 | 66 |
| 1672 | DEFB1 | −4.174807907 | 67 |
| 8076 | MFAP5 | −4.187157544 | 68 |
| 827 | CAPN6 | −4.472033713 | 69 |
| 7060 | THBS4 | −5.697080094 | 70 |

[0451] Delta HR across these 2 datasets was evaluated to obtain a combined Entrez gene ranking for each of the signature Entrez genes. This is summarized in Table 37 below:

Combined

| Entrez Gene | Gene | Delta HR |
|---|---|---|
| 12 | SERPINA3 | −0.588728819 |
| 152 | ADRA2C | 2.309763834 |
| 354 | KLK3 | −0.243178342 |
| 563 | AZGP1 | 6.087335434 |
| 827 | CAPN6 | −6.090262167 |
| 1164 | CKS2 | −0.548589258 |
| 1672 | DEFB1 | −5.177919023 |
| 1803 | DPP4 | 1.60390272 |
| 1847 | DUSP5 | 1.6194786 |
| 2138 | EYA1 | 1.732443216 |
| 2354 | FOSB | 5.077080272 |
| 2920 | CXCL2 | −2.237233137 |
| 3832 | KIF11 | 2.004659943 |
| 3852 | KRT5 | 8.308388576 |
| 4057 | LTF | 2.168670336 |
| 4316 | MMP7 | −7.800625203 |
| 4489 | MT1A | 4.221083323 |
| 4588 | MUC6 | −1.02701054 |
| 4604 | MYBPC1 | 3.423984055 |
| 5054 | SERPINE1 | −0.559998768 |
| 5121 | PCP4 | 3.487897386 |
| 5166 | PDK4 | −0.675467876 |
| 5179 | PENK | 6.001995681 |
| 5317 | PKP1 | −1.082613399 |
| 5346 | PLIN1 | −0.532141166 |
| 5354 | PLP1 | −2.745692087 |
| 6401 | SELE | 3.817194522 |
| 6406 | SEMG1 | −1.856201393 |
| 6422 | SFRP1 | −1.231622942 |
| 6614 | SIGLEC1 | 1.058219648 |
| 6652 | SORD | −0.716101659 |
| 7060 | THBS4 | −10.25364888 |
| 7083 | TK1 | 2.109762169 |
| 7538 | ZFP36 | 2.057694688 |
| 7739 | ZNF185 | −2.000259592 |
| 8076 | MFAP5 | −5.912100393 |
| 9076 | CLDN1 | −1.014396437 |
| 9232 | PTTG1 | 4.183523517 |
| 9506 | PAGE4 | 0.771051772 |
| 9955 | HS3ST3A1 | 0.438399729 |
| 10257 | ABCC4 | −0.9109417 |
| 23677 | SH3BP4 | 2.341214123 |
| 23764 | MAFF | 2.20725298 |
| 23784 | POTEH | 0.056059594 |
| 25907 | TMEM158 | 1.724346854 |
| 27063 | ANKRD1 | −8.345511486 |
| 29951 | PDZRN4 | 0.251538716 |
| 50636 | ANO7 | 3.270966342 |
| 50652 | PCA3 | 2.659017364 |
| 51001 | MTERFD1 | −1.198102909 |
| 51050 | PI15 | −0.14830814 |
| 54097 | FAM3B | −1.274696959 |
| 56849 | TCEAL7 | −2.585993869 |
| 57176 | VARS2 | −0.02003256 |
| 57481 | KIAA1210 | 1.866022273 |
| 79054 | TRPM8 | 0.429662725 |
| 79689 | STEAP4 | 0.003969308 |
| 84870 | RSPO3 | −4.90291866 |
| 84889 | SLC7A3 | −1.257450797 |
| 91661 | ZNF765 | −0.113068252 |
| 130733 | TMEM178A | −1.463299061 |
| 283194 | #N/A | −1.179206229 |
| 284837 | #N/A | −0.146303844 |
| 285016 | FAM150B | −6.657999164 |
| 340419 | RSPO2 | 7.4032047 |
| 406988 | MIR205HG | −3.534398055 |
| 644844 | PHGR1 | −1.067000018 |
| 693163 | MIR578 | 1.827836834 |
| 100616163 | MIR4530 | 0.236584996 |
| 101928017 | UBXN10- | 1.318500539 |
| | AS1 | |

[0452] The ranks assigned to the signature Entrez genes based on the combined core set analysis is summarized in Table 38 below:

| Entrez Gene | Gene | Total Delta HR | Rank |
|---|---|---|---|
| 3852 | KRT5 | 8.308388576 | 1 |
| 340419 | RSPO2 | 7.4032047 | 2 |
| 563 | AZGP1 | 6.087335434 | 3 |
| 5179 | PENK | 6.001995681 | 4 |
| 2354 | FOSB | 5.077080272 | 5 |
| 4489 | MT1A | 4.221083323 | 6 |
| 9232 | PTTG1 | 4.183523517 | 7 |
| 6401 | SELE | 3.817194522 | 8 |
| 5121 | PCP4 | 3.487897386 | 9 |
| 4604 | MYBPC1 | 3.423984055 | 10 |
| 50636 | ANO7 | 3.270966342 | 11 |
| 50652 | PCA3 | 2.659017364 | 12 |
| 23677 | SH3BP4 | 2.341214123 | 13 |
| 152 | ADRA2C | 2.309763834 | 14 |
| 23764 | MAFF | 2.20725298 | 15 |
| 4057 | LTF | 2.168670336 | 16 |
| 7083 | TK1 | 2.109762169 | 17 |
| 7538 | ZFP36 | 2.057694688 | 18 |
| 3832 | KIF11 | 2.004659943 | 19 |
| 57481 | KIAA1210 | 1.866022273 | 20 |
| 693163 | MIR578 | 1.827836834 | 21 |
| 2138 | EYA1 | 1.732443216 | 22 |
| 25907 | TMEM158 | 1.724346854 | 23 |
| 1847 | DUSP5 | 1.6194786 | 24 |
| 1803 | DPP4 | 1.60390272 | 25 |
| 101928017 | UBXN10- | 1.318500539 | 26 |
| | AS1 | | |
| 6614 | SIGLEC1 | 1.058219648 | 27 |
| 9506 | PAGE4 | 0.771051772 | 28 |
| 9955 | HS3ST3A1 | 0.438399729 | 29 |
| 79054 | TRPM8 | 0.429662725 | 30 |
| 100616163 | MIR4530 | 0.236584996 | 31 |
| 23784 | POTEH | 0.056059594 | 32 |
| 79689 | STEAP4 | 0.003969308 | 33 |
| 57176 | VARS2 | −0.02003256 | 34 |
| 91661 | ZNF765 | −0.113068252 | 35 |
| 284837 | #N/A | −0.146303844 | 36 |
| 51050 | PI15 | −0.14830814 | 37 |
| 354 | KLK3 | −0.243178342 | 38 |
| 29951 | PDZRN4 | −0.251538716 | 39 |
| 5346 | PLIN1 | −0.532141166 | 40 |
| 1164 | CKS2 | −0.548589258 | 41 |
| 5054 | SERPINE1 | −0.559998768 | 42 |
| 12 | SERPINA3 | −0.588728819 | 43 |
| 5166 | PDK4 | −0.675467876 | 44 |
| 6652 | SORD | −0.716101659 | 45 |
| 10257 | ABCC4 | −0.9109417 | 46 |
| 9076 | CLDN1 | −1.014396437 | 47 |
| 4588 | MUC6 | −1.02701054 | 48 |
| 644844 | PHGR1 | −1.067000018 | 49 |
| 5317 | PKP1 | −1.082613399 | 50 |
| 283194 | #N/A | −1.179206229 | 51 |
| 51001 | MTERFD1 | −1.198102909 | 52 |
| 6422 | SFRP1 | −1.231622942 | 53 |
| 84889 | SLC7A3 | −1.257450797 | 54 |
| 54097 | FAM3B | −1.274696959 | 55 |
| 130733 | TMEM178A | −1.463299061 | 56 |
| 6406 | SEMG1 | −1.856201393 | 57 |
| 7739 | ZNF185 | −2.000259592 | 58 |
| 2920 | CXCL2 | −2.237233137 | 59 |
| 56849 | TCEAL7 | −2.585993869 | 60 |
| 5354 | PLP1 | −2.745692087 | 61 |
| 406988 | MIR205HG | −3.534398055 | 62 |
| 84870 | RSPO3 | −4.90291866 | 63 |
| 1672 | DEFB1 | −5.177919023 | 64 |
| 8076 | MFAP5 | −5.912100393 | 65 |
| 827 | CAPN6 | −6.090262167 | 66 |
| 285016 | FAM150B | −6.657999164 | 67 |
| 4316 | MMP7 | −7.800625203 | 68 |
| 27063 | ANKRD1 | −8.345511486 | 69 |
| 7060 | THBS4 | −10.25364888 | 70 |

[0453] Minimum Gene Analysis

[0454] The results for the minimum gene analysis of the 70 gene signature in 2 datasets is provided in this section.
[0455] FASTMAN Biopsy Validation: The average HR performance measured in this dataset using the random sampling of the signature Entrez genes from a feature length of 1 to 30 is shown in FIG. 22. This figure shows that to retain a significant HR performance (i.e. lower CI of HR>1) a minimum of 12 of the signature Entrez genes must be selected.
[0456] Internal Resection Validation: The average HR performance measured in this dataset using the random sampling of the signature Entrez genes from a feature length of 1 to 30 is shown in FIG. 23. This figure shows that to retain a significant HR performance (i.e. lower CI of HR>1) a minimum of 7 of the signature Entrez genes must be selected.

[0457] The present invention is not to be limited in scope by the specific embodiments described herein. Indeed, various modifications of the invention in addition to those described herein will become apparent to those skilled in the art from the foregoing description and accompanying figures. Such modifications are intended to fall within the scope of the appended claims. Moreover, all embodiments described herein are considered to be broadly applicable and combinable with any and all other consistent embodiments, as appropriate.

[0458] Various publications are cited herein, the disclosures of which are incorporated by reference in their entireties.

The application's sequence listing, which the Patent Office published only in electronic form, follows.

SEQUENCE LISTING (3154 sequences)

SEQ ID NO: 1 - DNA, 955 bp, Homo sapiens
aaaaagcattgaatggaaaatcaatatttaaaacaaagttcaatttagctggatttctgaactatggttttgaatgtttaaagaagaatgatgggtacagttaggaaagtttttttcttacaccgtgactgagggaaacattgcttgtctttgagaaattgactgacatactggaagagaacaccattttatctcaggttagtgaagaatcagtgcaggtccctgactcttattttcccagaggccatggagctgagattgagactagccttgtggtttcacactaaagagtttccttgttatgggcaacatgcatgacctaatgtcttgcaaaatccaatagaagtattgcagcttccttctctggctcaagggctgagttaagtgaaaggaaaaacagcacaatggtgaccactgataaaggctttattaggtatatctgaggaagtgggtcacatgaaatgtaaaaagggaatgaggtttttgttgttttttggaagtaaaggcaaacataaatattaccatgatgaattctagtgaaatgaccccttgactttgcttttcttaatacagatatttactgagaggaactatttttataacacaagaaaaatttacaattgattaaaagtatccatgtcttggatacatacgtatctatagagctggcatgtaattcttcctctataaagaataggtataggaaagactgaataaaaatggagggatatccccttggatttcacttgcattgtgcaataagcaaagaagggttgataaaagttcttgatcaaaaagttcaaagaaaccagaattttagacagcaagctaaataaatattgtaaaattgcactatattaggttaagtattatttaggtattataatatgctttgtaaattttatattccaaatattgctcaatatttttcatctattaaattaatttctagtgt

SEQ ID NO: 2 - DNA, 1510 bp, Homo sapiens
cgtctcgctgacgcgggtcgtcgctgattctgccgagtcccgcgctgtatttgtctttgttctgtttctccctatatgttctttctgtgttctcgttgttcttcgtatccttcttcggtcttccttttgtaggcctcgttcttctctttctttttcctctctgtgtattttgcttgttgctgttggtctgccttcaatgtttgtcctatgttcactctttgcctgtacatatccggtactgttctccttctgcgtccgctgttctcttgactgcgtgtgtgttttggcgctttgcatgtgttctatcactctgtcgtgtttggtagcccttttgccatcaccggctctggggccttcttgtgtggccgttgcctgacctttcttctggagtctgttcactctgctttgtttttaccttaggagttcagtgcctctgcatatttgagttccgtgagctgtctgagtagtcctttctcagattctgtgccagtctggctttggacagctcttctccgaggggagtctgtacagtagccttgctcgtgttggtatgcttggacttgggttcccagccatgccctgctatcgttctcgtccctaagtccctcgtgtagtcctgtccctgccctagtgacatcactgcccacatcttgccatccctttaaagaagagaactacatttgaaccagtccagttagaaaaagattaaaatcctgctcagggaatctatgcaaagcctccatatatacaattcctatttgttgtttcagcagctgatgcagaaatgattttatacaataaaacccgaccggataagttcaaacttctgtaaggtaataatctgttgtgaagacagaagtccctacttaagatgataggtatgaaatttgggaacaaaggtaaccttaagtttcttgatttgagtgtgtattttaaagatcaacaacatcttgacagtgcagttatgagataatgaaaacaaaaatgagttttaataagctttaaatggcatggtattttgaggtgctaaggtaaagagaaacattgttttatgaagtggctcatgtgggtatatatatgttggtgtgctgtgctgctagctattccatggtcttcatcagtataccacattgcctggaaatccactccaacatcgaccagggctttggagatctgagctgactgctgaaagtgaacgttatcatctgctgttccatgaataaggaggtactcaacttgtttaaaattttcagctctgctcatgactgttgaatttcggtaatggtcaagggtgtctgtctggagtctgggagacccatgtaacgttctgtgtacactgagtcatagtactcccaccgggatacaggcgccacggctattccacacttgaacacgccacttcccgatcccaggaccattgaggtacgtacccttcatatgaccagccccaaattgcaattcgtttgttgccacaaatcccatttttgaaaattggctggctgcttaaatt

SEQ ID NO: 3 - DNA, 587 bp, Homo sapiens
gaaaacaaaggctttctatatttaaaatgatacagaaataatttcaacaataaacactgatttatctctagatagtaggataagagaaattttctgtttttactttctatatgtaatgtttcttataattaggaaaatgctgaatgtaatcatggctctcttattccagcctgactcaaagcccagtgttgtttatgtggtttgttagcttgcagttctagagacaccagaggtggaactggtgaattcattcattcgtgagggccccctttatgcctcaatttcccatctgtaaaactggatgatgatatacctcatcgggtcagtgtgagaattgcgtgagttaaaatctgttaagtgcatacaactagcactggctcgcaggaagcactaaggaagtttatgctgctgttattgtccattgagtgttttttacatgcagaatgctgggtcaagccctgtaaggctgtaggggacgaagggaaagtgacttaaggagggacgagggaatgaagggcatgagaaaataagtggtttgctgccaaattttcttgtagaattccaacagaaatcacaccagacacacc

SEQ ID NO: 4 - DNA, 5455 bp, Homo sapiens
agcattcaaaccttgcagagctttgctctcagagagtttgtaaaaagacacactcctcttacaagagttcatgctaccacatagcaaagaaccttaaatttttggaagaacaatatattcattttggcattgtgcagagcaaagtaaactcggtggcctcttcttctccacccctcaaaatgatagcaatctctgccgtcagcagtgcactcctgttctcccttctctgtgaagcaagtaccgtcgtcctactcaattccactgactcatccccgccaaccaataatttcactgatattgaagcagctctgaaagcacaattagattcagcggatatccccaaagccaggcggaagcgctacatttcgcagaatgacatgatcgccattcttgattatcataatcaagttcggggcaaagtgttcccaccggcagcaaatatggaatatatggtttgggatgaaaatcttgcaaaatcggcagaggcttgggcggctacttgcatttgggaccatggaccttcttacttactgagatttttgggccaaaatctatctgtacgcactggaagatatcgctctattctccagttggtcaagccatggtatgatgaagtgaaagattatgcttttccatatccccaggattgcaaccccagatgtcctatgagatgttttggtcccatgtgcacacattatacgcagatggtttgggccacttccaatcggataggatgcgcaattcatacttgccaaaacatgaatgtttggggatctgtgtggcgacgtgcagtttacttggtatgcaactatgccccaaagggcaattggattggagaagcaccatataaagtaggggtaccatgttcatcttgtcctccaagttatgggggatcttgtactgacaatctgtgttttccaggagttacgtcaaactacctgtactggtttaaataagtttaccttttcctccaggaaatataatgatttctgggaacatgggcatgtatatatatatatggagagagaattttgcacatattatacatattttgtgctaatcttgttttcctcttagtattcctttgtataaattagtgtttgtctagcatgtttgtttaatcctttgaaatatttgaaacatcaatttctattttctgacctctaagcctaaattaagatattgtatatgtaatgatgacatagttgatgcatccaatcctaaaacttacattccaaaggaattatatcattatgttcctaaggagtaaatatatatttgacctgtaagtgtgtgtatgtatacatatacatatgtatgtgtatggatttatatatgcacacaaacatataatatgtgatgtaacatgtagatgataatatgattcagtagtcaacttgagggaaatttttaaaaaactattctcaattatatacgaggtgatgggacttcttaacacacatttctataatacccatgaaatgataatttgtaaaataacacttagtgatatctggaaataataattcaattaagcaaccacgaatttcaccctggagatattttttcttatttgagtccaccaaaggataatgccaacttatataagttctcaaatcatgccttccgcttagtctcattttattcattcagtcgtcatgagttgagtgcttactacatgcaaggcactctgctagttatattctaataatgcagagataattagacatggttcccgccctcaagaagctcacaaaagtattcaggaaataatgcagactagtgattttgctataaaattatttttgaaggaagcagacacagcagtatttacctgtaggtggagcaagtaataagccatgctgtgcaatatatacataaagcttctgcttctcatgggaatttagttacagtgcttggaatgagaaggggaaggaaagaattaacaaatgccaagatttctggagcagattgtacagctgtgactttggaaaacagaaagtaagaccctcagaaaaccaatgaagtctaagagaaataaaatttagtggacaggtatgaaaagtgtaattgcgcctaactaccagatggagagcttcagaatgggctatccttagagtctagtacatcttgaggcctctcagcaggagacaaaggattccaaaaagagatgtggaggtgctgagggcacctctatctctttgttgtttagtctgtcattgaatcaatctacttatcatcttgggtctttgagtattgtatgaaagatccttcgtgcacaccacacacagtcatgattttgttaaagtagccttcttcagatgcttttctaagggctagttaccaactttatttctgtgtttctgtagaagaaacattttcagttcttcattgagtttgattatggaaatccattcaaagtcactatgaaaattttactcatgtagtttggaaatgcaacattttcctatcatgaaatctctttcagagaggagaatacaacatcttagtccagacatttaacatactgcatttcaagtacatgtgtgtgtgttttattcaggttgtgtaatgctcccgtagaattatagaacaattaaatatggttagttccagagtgcaaattacagaaggaagctacttgtttaaaattccatacacgtttgcagtttcttgtacacatttggatactttgaaagatgacagattgttaaatccattcaatggtaaagaaactcaccatctggagattgagtctacttgttaatgaatgactagcccaattatccttataaattgaatatggtgaccaaatgctttgatatcatactactctgcctttgtgggcacatatgtagacactactaaaaataaatatttttggagattaaaatggagaatagaagtaattacattatttaggtcttaatccaacttttttctaatatatctaaacaattgaaagggaagcttattcatggaatattggcttgatttatctagaaagtttttccttcttcaattttactatattcattctacaggaacagcaataagtactattaaacagaagatggctacactaagttccaattttgttgctgaattgcttctgtgagttcacttttcagttctaaggaagaataatatttgctacatatttcacaggggttcttatgaaggtaaatttaccagattaataaaaatttatgaatattaaaattatcattaataatataaaacacttatttgagattaaattaaatttttcatgagcccctctttggcaggaactctgtttaattctttgtatttatcccagcttcttaaatggtggctgtaacataataaatgtttaataaatgcttatatgaatggatttttagaattaactaagaagccaaaaatggcaacaatttacagaaatcccacctttccatgcttaagacaaaaatgtcttaaatataaagctgtgattatatcaaaaatccagataaatcatcaaatatatcagattaagaccagggtttacacacttaggcaatagtcctttccaaaccatgacaaaaactacaagtttatttataatttaacaactcagctgaaaatataacgggtatatttgttattctaactctattttttaaagttaataatataaagtggccatgtaaaatattttattttccaggctaaagcaaatgaaagtttgctggtatcaacacagcctgccatatttttcacagcatgcaacaatggtgctaggatagctatttcttactgtaattgccagaggcagaaatggtctgggtataagctatttcataaaagcagctttaaattgtcagtattaaggttttcatgtggaaaggtgtcattcaaaaaaaaagtaattggcatacatattccacatcatcgatcctctctgtggtgttaatttttttatatgaccagtagaaaaattttaatattctcacaatataggttttggggcttccatatcatcaaaagactgaaaaattataattttagaattaaactgatggatttcattatagaattatctgtgagttgtgtagacacagtcttaatgtttctggttatgacagataagtttgctcaaaaaatgtggatgaagccattattgttattattgttattgcttctgttcagttgtctaagtatcatcccttctgtggcccatcacgcagcagagttgccctacaaatttcatttggcagcgccataacattcatttaaaaagtttatgaaaacattcatttgaaagttccatgcagctttagcacagagttgaccaaacactggcgtaagttcaatttacacagaatatttgaattgaaacaatagaaatttttctcataatatatacctatgtgaaaccaacttatctgcataattaaatctaatacatatttaagccagtttaagtgctttgtgttgatgccatgcttatcaaatacatgcacaagctaaacataatttgaatgggtctatgaaggaaaaataatgcttagactttggtgtaggttcttcctgtgtagccatatacccaggctctgcagtatcgaaggatgcaaatgttgacatagatggaagctcttacctaccaaagtgtttaggaaggataaagttacatttgtcttaatttctaacattatctttgcttttatgtttcataaaaatttgtcattatttatgctggtgaaacgtataatcacatccaattatttgaacacatgcaaaataattttttaaattatgttattgtttaaatttgacttatgggagatcagtcaaaaacttagaaggtttaacacttcactgattaatggtgctgaaaacacgttacaattaccacatatccttgctataagttttgaagtttcttagcaattaaagtttttttattcagtgtgaactgtcagtatctattctggtgctaaatgtatggtgctaaatgaattgttagtgttgatggctttagtaatgctccttttattcattgctaaatttagtgttatccatttgattcctgattcagaaatatcaataaaatcctatgttaaattaatctttaccaaaaacaggcaagttaactctgttgttttaattcaacagtccaacattatttaggtgttacagagtgtaaatatatttctttgggagttattttctttttaaaatctttttatagcttggcaatgtccaaagtcaaatatcacctaaactggttagattacttctacagctaataatattgcaggcactggcgccctctggtggttatgaagacaaattcttaatggctacttgacctacagcaaaagccatttctgtaccataaaaatttgttgtgcaatattagaattatcatatgtttcctacatctgacagcacctaaaatgtttgataatattaacatgtatctaagagg

SEQ ID NO: 5 - DNA, 529 bp, Homo sapiens
atgtacgcagccctgagggagccggtgggtgtgcacctgttcaatcccagcccctccctgacctgtacaaatacacctgaggacagacagtgccccagacttcctgcccctgctctgcactctcaggtattccctgctcttactccaaaaagatggacccaggtccgaaggggcactgccactgtggggggcatggccatcctccaggtcactgcgggccaccccctggccatggcccagggccctgcgggccacccccccaccatggtccagggccctgcgggccaccccctggccatggcccagggccctgcgggccacccccccaccatggtccagggccctgcgggcctccccctggccatggcccaggtcacccaccccctggtccacatcactgaggaagtagaagaaaacaggacacaagatggcaagcctgagagaattgcccagctgacctggaatgaggcctaaaccacaatcttctcttcctaataaacagcctcctagaggccacattctattcttt

SEQ ID NO: 6 - DNA, 295 bp, Homo sapiens
ccatataatttaaaaagaaaaaaaaaatcaaaatataatatatttttttaccaatcggtagagaagagacagtttaatatttgtgctgaaaatatgtttcagtatttttttcaatgaatgttaagagattgttctcactcccgccccatcttaatgtataaccaacaccaaacacgtggatcaacagaaaaggaaaatttcactcgtctaaacactttcaattttcagtttttattttatgttctatatacccagtcataaagtataagcatcagttgtcattaaaagttttcag

SEQ ID NO: 7 - DNA, 2776 bp, Homo sapiens
gggtggtgcagggcaggggtggtatatcctgtctgacggagggcgggcctcgccagtgccagagagggacgaaccagggtggaagcgccaggagcagctgcagggagccctcacgcggacctcgcactctatggccgtagggagccgctgagagcgagaagagcacgctcctgcccgcccgctgcaccgcacctcgcctcgcctctctgctctcctaggccccggccgcgcgccacccgcctcccgccaccatgaaccactcgccgctcaagaccgccttggcgtacgaatgcttccaggaccaggacaactccacgttggctttgccgtcggaccaaaagatgaaaacaggcacgtctggcaggcagcgcgtgcaggagcaggtgatgatgaccgtcaagcggcagaagtccaagtcttcccagtcgtccaccctgagccactccaatcgaggttccatgtatgatggcttggctgacaattacaactatgggaccaccagcaggagcagctactactccaagttccaggcagggaatggctcatggggatatccgatctacaatggaaccctcaagcgggagcctgacaacaggcgcttcagctcctacagccagatggagaactggagccggcactacccccggggcagctgtaacaccaccggcgcaggcagcgacatctgcttcatgcagaaaatcaaggcgagccgcagtgagcccgacctctactgtgacccacggggcaccctgcgcaagggcacgctgggcagcaagggccagaagaccacccagaaccgctacagcttttacagcacctgcagtggtcagaaggccataaagaagtgccctgtgcgcccgccctcttgtgcctccaagcaggaccctgtgtatatcccgcccatctcctgcaacaaggacctgtcctttggccactctagggccagctccaagatctgcagtgaggacatcgagtgcagtgggctgaccatccccaaggctgtgcagtacctgagctcccaggatgagaagtaccaggccattggggcctattacatccagcatacctgcttccaggatgaatctgccaagcaacaggtctatcagctgggaggcatctgcaagctggtggacctcctccgcagccccaaccagaacgtccagcaggccgcggcaggggccctgcgcaacctggtgttcaggagcaccaccaacaagctggagacccggaggcagaatgggatccgcgaggcagtcagcctcctgaggagaaccgggaacgccgagatccagaagcagctgactgggctgctctggaacctgtcttccactgacgagctgaaggaggaactcattgccgacgccctgcctgttctggccgaccgcgtcatcattcccttctctggctggtgcgatggcaatagcaacatgtcccgggaagtggtggaccctgaggtcttcttcaatgccacaggctgcttgagaaagagactgggcatgcgggagcttctggctcttgttccgcaaagggccactagtagcagggtgaacctgagctcggccgatgcaggccgccagaccatgcgtaactactcagggctcattgattccctcatggcctatgtccagaactgtgtagcggccagccgctgtgacgacaagtctgtggaaaactgcatgtgtgttctgcacaacctctcctaccgcctggacgccgaggtgcccacccgctaccgccagctggagtataacgcccgcaacgcctacaccgagaagtcctccactggctgcttcagcaacaagagcgacaagatgatgaacaacaactatgactgccccctgcctgaggaagagaccaaccccaagggcagcggctggttgtaccattcagatgccatccgcacctacctgaacctcatgggcaagagcaagaaagatgctaccctggaggcctgtgctggtgccctgcagaacctgacagccagcaaggggctgatgtccagtggcatgagccagttgattgggctgaaggaaaagggcctgccacaaattgcccgcctcctgcaatctggcaactctgatgtggtgcggtccggagcctccctcctgagcaacatgtcccgccaccctctgctgcacagagtgatggggaaccaggtgttcccggaggtgaccaggctcctcaccagccacactggcaataccagcaactccgaagacatcttgtcctcggcctgctacactgtgaggaacctgatggcctcgcagccacaactggccaagcagtacttctccagcagcatgctcaacaacatcatcaacctgtgccgaagcagtgcctcacccaaggccgcagaagctgcccggcttctcctgtctgacatgtggtccagcaaggaactgcagggtgtcctcagacagcaaggtttcgataggaacatgctgggaaccttagctggggccaacagcctcaggaacttcacctcccgattctaagaagagactgtccaagcaagttaggcttgcaggaagatatgacccagctgagaagccctcaggcctcgctggatggggttttctgtccatcctatgcagtatttgggaaagttcacaagaaactgagaagaaacctaaaaactgtggatagtggaaagatttttagattttttttttccttggggaaactggcaggcaatgggggttagggaggttggggcggtgggggctttcttgagttaaaggggcttatatgtgatgtcaatatttcttcctctgag

SEQ ID NO: 8 - DNA, 1026 bp, Homo sapiens
agggttccatgagattattgtagactcatgatgctgctatctcaaccagatgcccaggacaggtgctctagccattaggaccacaaatggacatgtcagttattgctctgtctaaacaacattcccagtagttgctatattcttcatacaagcatagttaacaacaaagagccaaaagatcaaagaagggatactttcagatggttgtcttgtgtgcttctctgcatttttaaaagacaagacattcttgtacatattatcaataggctataagatgtaacaacgaaatgatgacatctggagaagaaacatcttttccttataaaaatgtgttttcaagctgttgttttaagaagcaaaagatagttctgcaaattcaaagatacagtatcccttcaaaacaaataggagttcagggaagagaaacatccttcaaaggacagtgttgttttgaccgggagatctagagagtgctcagaattagggcctggcatttggaatcacaggatttatcatcacagaaacaactgttttaagattagttccatcactctcatcctgtatttttataagaaacacaagagtgcataccagaattgaatataccatatgggattggagaaagacaaatgtggaagaaatcatagagctggagactacttttgtgctttacaaaactgtgaaggattgtggtcacctggaacaggtctccaatctatgttagcactatgtggctcagcctctgttaccccttggattatatatcaacctgtaaacatgtgcctgtaacttacttccaaaaacaaaatcatacttattagaagaaaattctgattttatagaaaaaaaatagagcaaggagaatataacatgtttgcaaagtcatgtgctttctttctcaatgagggaaaaacaattttattacctgcttaatggtccacctggaactaaaagggatactattttctaacaaggtatatctagtaggggagaaagccaccacaataaatatatttgttaatagtt

SEQ ID NO: 9 - DNA, 950 bp, Homo sapiens
attccagcctcattgtaacacacattctacgcctagcctggctttcttgctctccctcatctcattgtttcagcggaggccaaatctgaagtcctttccagggagtggctctgttcatcttattcgccagccaaagtaggaacagcgtaagaggagagagacacattcagcagccaaaggactcggtggaaagagcagaacaccatagacaatatgtcgctcttgggacccaaggtgctgctgtttcttgctgcattcatcatcacctctgactggatacccctgggggtcaatagtcaacgaggagacgatgtgactcaagcgactccagaaacattcacagaagatcctaatctggtgaatgatcccgctacagatgaaacagttttggctgttttggctgatattgcaccttccacagatgacttggcctccctcagtgaaaaaaataccactgcagagtgctgggatgagaaatttacctgcacaaggctctactctgtgcatcggccggttaaacaatgcattcatcagttatgcttcaccagtttacgacgtatgtacatcgtcaacaaggagatctgctctcgtcttgtctgtaaggaacacgaagctatgaaagatgagctttgccgtcagatggctggtctgccccctaggagactccgtcgctccaattacttccgacttcctccctgtgaaaatgtggatttgcagagacccaatggtctgtgatcattgaaaaagaggaaagaagaaaaaatgtatgggtgagaggaaggaggatctccttcttctccaaccattgacagctaacccttagacagtatttcttaaaccaatccttttgcaatgtccagcttttacccctactctctactttttcacccaaactgataacatttatctcattttctagcacttaaaatacaaagtctatattattgcat

SEQ ID NO: 10 - DNA, 1192 bp, Homo sapiens
cagcgctcggcactttgacagcgcacagctgctctgtgaccagggacagatccagcaggccccagtctcgcatcagcgccggcctccagaacttagcaatttccgcctggtgatgcgcagttgctgtcagtcttgacctctgcctttgtggtgaatggaggaccacgtctatttcatcagaacagctgttgactctagtactgtgaatccagtgaaaataagccatgagaatgttttagcacagcgttatgtgtctgccacattaactacacggttcaaacctgtgaagaaaggacctgcaaacgcttcagttgttagcattttcaatgtgatataaacagcttctccaatacagcaaacctaattgcacaacagagactgaaatgtgtttcctgaataccagtggaggaattttcttgtaaagaaggtttactttttggtgtctcatacccagggtaatctgtacatctctacttatttatgaacagactttttttaaaaagataaaaaaacagctttattgaggtataattcacccaccagacttttttaaacatcaaataattgaagagacaatagcattagaaataagtgattaaaggcctctgcctcacaacatggcaagtacagtactttgaattttagcacattgcataatagttttaagtatgtctaatttaaacgtataatatgtacatcactgagacaatcatgtacagaaagaatttttggtgtaaatttgtaataatggataattcttttacatattgtttagggaaatgatattgaaaggtagcaatgcctggatagtgaagcatgaggcagcacgtgcacaaattcatgtgccgtgccttatctgagttttcggtataaatatgtagataatggatttttttttagataatgttgtcaagaccaaaagcatggatgtcaagtgtcagtaaggattttgttttctaaaattttttcctgcatcagttcttctgagggccttgatgaaataacacagcagtttcttaaacaatttgaaacaaaatgagctctcctaccacctcactttttcatttccacactaatgtattatatgtaactacttggaaaaaataattattcaaatgcttcttcccacaaagaatatagatgatagtagatatattttattaataaaatggttcatgaatcggagactaac

SEQ ID NO: 11 - DNA, 688 bp, Homo sapiens
  modified_base (596)..(596): a, c, g, or t
aaatttgaaggctcattaattaaatgactgggagaaatgccatactatgtagaatggcaatactaatacataacattggcttttatgtcccattttttacaatgagtccagggaagtccaaatacttcttttaattaagacactcaaagaaatgaaataagaaaaattgatgcaaggactccttcaagataagatttgtgatcacaaatattttcatctttcaacagggcaagctgatgtgttcacatctcactttcaagctgcctctttcactaggaacatcagtattattttttaaaagcacatccacaatgctttcccatcacccttgctgagattttgtagcacctatagccataactggcacctgggggcctgcgttgctggcagtttcccttacatttctttggagtcttttcaactgctgtggttttacttagaagtcagtgctttgcatatttgatttcctgagactgtttgaatagtctttctcagaaaactgtgccagtctggctgtgaacagctcttctccgaggggagctgaccagtagcctgctcgtgttggtatgcttggactggggttcccagcatgcccngtaatctctctcccaaacccccttatccggtccctgccccaatgacaatcatggccaatcttgccaccccttaaagaagagacaacatttga

SEQ ID NO: 12 - DNA, 5423 bp, Homo sapiens
  modified_base (9)..(9): a, c, g, or t
  modified_base (1239)..(1239): a, c, g, or t
cccgggagntggagcttgcagtgagccaagatggtgccactgmmctccagcctgggtgacaaagcgagactccatctcaaaaaaagaaaaaaaagaaagcattgggaaagcctaaatggtctacaggccacttggaagagaagtgacacaactctcagaaagggaaagaatgaatgaatgaaagaatgtgctttctggggaggaacagtcagcatttttgataatttctgagaggcaggtcagtggagtagttaagaccatgaacgctagggccagattctgcttcttcatatttttacagccttgggaaagttattctctctgtgccacactttgtttatctgaaacatgaagacamctacagcatcttctttacagagtctttctaaaaattaaatgagttaatttttgtaaaatccttcaaagagtcccagccatatgttaagttccatgtaaatactttgctaataaaaataaaattttggagttataagcgcagagtttcttggataatactgttctatgtcctaaggaattacaacacatatacttagtgtttcaatgaacaccaagataaataagtgaagagctagtccgctgtgagtctcctcagtgacacagggctggatcaccatcgacggcactttctgagtactcagtgcagcaaagaaagactacagacatctcaatggcaggggtgagttacatggtagaacgaagaatagaccagaagccagaagtgctggcctttaaccatatacctgctattcgctagctgtgtaccctctgcaaatgtcctgggtcttagattggtgtctatgaattagacaatctttaagatctcttctagcctcccccatgttacgtgtcattttccttaggtttcttttaaagtgcccaaaacagtccacatagtaggtattgtggtgattaaacagaaaggcactgaaccacaaagcagacacttgattaacatcagttgtatctgactatgcctttttttgtttgtttgtttttttggaaacagagttccactctgtcgcccaggttcgagtgcaatggcmmaattacagctcactgcaacctccgcctcccatgttccagcaattctcctgcctcagcctcccaagtagctgggattacaggcatgcaccagcacgcccagctaatttttgtatttttagtagagatggggtttcaccatattggccaggctggtcttgaactcctgacctcagntgacccacctgcctcagcctcccaaagtgctgggattacaggtgtgagccactgctccccaagaagtcatatgacctgtgggrtctctagaggggacctcaagagaatggtgtgtgtcaggcactgcactagtgactttatgtagattgcttcatttgttcctgccaacagcccactgaaataagtattaaaattctgtgcccagtgaagaaacagagagggtgtttgtgatgctcggaaaccaataatattgtgtgtagctctcaactcaagttcagggwwwgctgacaccttgccatttgtctcctcaaatggtcgtatgtatttccaggtgagaaataagaaaggctgctgactttaccatctgaggccacacatctgctgaaatggagataattaacatcactagaaacagcaagatgacaatataatgtctaagtagtgacatgtttttgcacatttccagcccctttaaatatccacacacacaggaagcacaaaaggaagcacagaggtaagtgctttataaagcactcaatttctactcagaaatttttgatggccttaagttcctctactcgtttctatccttcctactcactgtcctcccggaatccactaccgattttctatttcttgcctcgtattgtctgactggctcacttggatttatctcacggagtctggattttctacccgggctcacctccgtccctccatatttgtcctccactttcacagatccctgggagaaatgcccggccgccatcttgggtcatcgatgagcctcgccctgtgcctggtcccgcttgtgagggaaggacattagaaaatgaattgatgtgttccttaaaggatgggcaggaaaacagatcctgttgtggatatttatttgaacgggattacagatttgaaatgaagtcacaaagtgagcattaccaatgagaggaaaacagacgagaaaatcttgatggcttcacaagacatgcaacaaacaaaatggaatactgtgatgacatgaggcagccaagctggggaggagataaccacggggcagagggtcaggattctggccctgctgcctaaactgtgcgttcataaccaaatcatttcatatttctaaccctcaaaacaaagctgttgtaatatctgatctctacggttccttctgggcccaacattctccatatatccagccacactcatttttaatatttagttcccagatctgtactgtgacctttctacactgtagaataacattactcattttgttcaaagacccttcgtgttgctgcctaatatgtagctgactgtttttcctaaggagtgttctggcccaggggatctgtgaacaggctgggaagcatctcaagatctttccagggttatacttactagcacacagcatgatcattacggagtgaattatctaatcaacatcatcctcagtgtctttgcccatactgaaattcatttcccacttttgtgcccattctcaagacctcaaaatgtcattccattaatatcacaggattaacttttttttttaacctggaagaattcaatgttacatgcagctatgggaatttaattacatattttgttttccagtgcaaagatgactaagtcctttatccctcccctttgtttgattttttttccagtataaagttaaaatgcttagccttgtactgaggctgtatacagcacagcctctccccatccctccagccttatctgtcatcaccatcaacccctcccataccacctaaacaaaatctaacttgtaattccttgaacatgtcaggacatacattattccttctgcctgagaagctcttccttgtctcttaaatctagaatgatgtaaagttttgaataagttgactatcttacttcatgcaaagaagggacacatatgagattcatcatcacatgagacagcaaatactaaaagtgtaatttgattataagagtttagataaatatatgaaatgcaagagccacagagggaatgtttatggggcacgtttgtaagcctgggatgtgaagcaaaggcagggaacctcatagtatcttatataatatacttcatttctctatctctatcacaatatccaacaagcttttcacagaattcatgcagtgcaaatccccaaaggtaacctttatccatttcatggtgagtgcgctttagaattttggcaaatcatactggtcacttatctcaactttgagatgtgtttgtccttgtagttaattgaaagaaatagggcactcttgtgagccactttagggttcactcctggcaataaagaatttacaaagagctactcaggaccagttgttaagagctctgtgtgtgtgtgtgtgtgtgtgtgagtgtacatgccaaagtgtgcctctctctcttgacccattatttcagacttaaaacaagcatgttttcaaatggcactatgagctgccaatgatgtatcaccaccatatctcattattctccagtaaatgtgataataatgtcatctgttaacataaaaaaagtttgacttcacaaaagcagctggaaatggacaaccacaatatgcataaatctaactcctaccatcagctacacactgcttgacatatattgttagaagcacctcgcatttgtgggttctcttaagcaaaatacttgcattaggtctcagctggggctgtgcatcaggcggtttgagaaatattcaattctcagcagaagccagaatttgaattccctcatcttttaggaatcatttaccaggtttggagaggattcagacagctcaggtgctttcactaatgtctctgaacttctgtccctctttgtgttcatggatagtccaataaataatgttatctttgaactgatgctcataggagagaatataagaactctgagtgatatcaacattagggattcaaagaaatattagatttaagctcacactggtcaaaaggaaccaagatacaaagaactctgagctgtcatcgtccccatctctgtgagccacaaccaacagcaggacccaacgcatgtctgagatccttaaatcaaggaaaccagtgtcatgagttgaattctcctattatggatgctagcttctggccatctctggctctcctcttgacacatattagcttctagcctttgcttccacgacttttatcttttctccaacacatcgcttaccaatcctctctctgctctgttgctttggacttccccacaagaatttcaacgactctcaagtcttttcttccatccccaccactaacctgaatgcctagacccttatttttattaatttccaatagatgctgcctatgggctatattgctttagatgaacattagatatttaaagctcaagaggttcaaaatccaactcattatcttctctttctttcacctccctgctcctctccctatattactgattgcactgaacagcatggtccccaatgtagccatgcaaatgagaaacccagtggctccttgtggtacatgcatgcaagactgctgaagccagaaggatgactgattacgcctcatgggtggaggggaccactcctgggccttcgtgattgtcaggagcaagacctgagatgctccctgccttcagtgtcctctgcatctcccctttctaatgaagatccatagaatttgctacatttgagaattccaattaggaactcacatgttttatctgccctatcaattttttaaacttgctgaaaattaagttttttcaaaatctgtccttgtaaattactttttcttacagtgtcttggcatactatatcaactttgattctttgttacaacttttcttactcttttatcaccaaagtggcttttattctctttattattattattttcttttactactatattacgttgttattattttgttctctatagtatcaatttatttgatttagtttcaatttatttttattgctgacttttaaaataagtgattcggggggtgggagaacaggggagggagagcattaggacaaatacctaatgcatgtgggacttaaaacctagatgatgggttgataggtgcagcaaaccactatggcacacgtatacctgtgtaacaaacctacacattctgcacatgtatcccagaacgtaaagtaaaattt

SEQ ID NO: 13 - DNA, 14534 bp, Homo sapiens
cgtactggtccatagcctgttaggaaccaggctgcataacaggaggtgagtggcaggtgagtgaaatttcatctgtagttacagccactcctcatcactcgcattaccaccagagctccactccctgtcagatcagcggcggcattagattctcataggagctcgaaccctattctaaactgttcatgtgagggatctaggttgcaagctccctatgagaatctaatgcctgatgatctgtcacggtctcccatcacccctagatgggaccatctagttgcaggaaaacaagctcagggctcccactgattctacacgatggtgaattgtggaattatttcattatatatattacaatgtaataataatagaaataaagcacacaataaatgtaatgtgcttgaatcatcccgaaaccatcccaccctggtctgtgaaaaaattgtcttccatgaaaccagtccctggtgccaaaaacgttgaggaccactgctccacagaatctatcggtcactcttcctcccctcacccccttgccctaaaagcacaccctgcaaacctgccatgaattgacactctgtttctatcccttttccccttgtgtctgtgtctggaggaagaggataaaggacaagctgccccaagtcctagcgggcagctcgaggaagtgaaacttacacgttggtctcctgtttccttaccaagcttttaccatggtaacccctggtcccgttcagccaccaccaccccacccagcacacctccaacctcagccagacaaggttgttgacacaagagagccctcaggggcacagagagagtctggacacgtgggggagtcagccgtgtatcatcggaggcggccgggcacatggcagggatgagggaaagaccaagagtcctctgttgggcccaagtcctagacagacaaaacctagacaatcacgtggctggctgcatgccctgtggctgttgggctgggcccaggaggagggaggggcgctctttcctggaggtggtccagagcaccgggtggacagccctgggggaaaacttccacgttttgatggaggttatctttgataactccacagtgacctggttcgccaaaggaaaagcaggcaacgtgagctgttttttttttctccaagctgaacactaggggtcctaggctttttgggtcacccggcatggcagacagtcaacctggcaggacatccgggagagacagacacaggcagagggcagaaaggtcaagggaggttctcaggccaaggctattggggtttgctcaattgttcctgaatgctcttacacacgtacacacacagagcagcacacacacacacacacacacatgcctcagcaagtcccagagagggaggtgtcgagggggacccgctggctgttcagacggactcccagagccagtgagtgggtggggctggaacatgagttcatctatttcctgcccacatctggtataaaaggaggcagtggcccacagaggagcacagctgtgtttggctgcagggccaagagcgctgtcaagaagacccacacgcccccctccagcagctgaattcctgcagctcagcagccgccgccagagcaggacgaaccgccaatcgcaaggcacctctgagaacttcaggtaggagaaaagcaaactccctccaacctcttacttcgggcttaaggcagagaactcgcctccccagaatctcctccctccatgatcccccgctattcctctattttcttttcctcggacctgcagccttgggtcgaccctgccctaggggtgactgcaggagagcagggaggatggtcaggcgtcaccaacaaccccatcacccagtaacaagaaccttgactctctcagtccctctgcatcaagacacttacccatttcccacctcatgcctgctaacttgaatgaaacaatcgctgggaaagcattaagagaattaaggctgggcactgtggctcatgcctgtaatcccagcactttgtgaggctgaggcaggcagataacttgagcccaggagtttgagaccagcctgggcaacatggcaaaaccctgctctcccaaaaaaatacaaaaattagctgggcgtgctggtgtgcctgtattcccagctacttgggaggctgaggtgggaggattgcttcagctggggaggcggaggctgcagggagccaagactgagccattgcacccagcctgggtgacagagcaagaccctgtctctaaaaatgaatgaaaggaaggaagaaagagagagaaagagagagaggaaagaaggaaggaagtaaagaagaaagaaagaaagaaagaggaaagaggaagaaagaaagaaaagaaagaaaagaaaagaaagcaaatttaaagcttatgcaaatcaaagatgttgtgataattgataattgagtctgggctaaattccccctgggctgcaaaggcagagagtggtaatgacttctcacctgcttttcttctaaggcttttttacgggacacagagggaagggagatggactggattccaagattcccacagggcaagatgggcgaagactccctgccactgcccggggataagtcagtctgagtgagacggagtgggatgggcttagaacctgaacatgtcatggtctcttcctgcaccttgccctagtgttcacttaccacctgcttgcaggaaacaagaagagcagggcccacagctggccagctcccctcccctcccgcctgtcttccagaacgattccttcaccagccctctttccattgctctaggatgcagatgtctccagccctcacctgcctagtcctgggcctggcccttgtctttggtgaagggtctgctgtgcaccatcccccatcctacgtggcccacctggcctcagacttcggggtgagggtgtttcagcaggtggcgcaggcctccaaggaccgcaacgtggttttctcaccctatggggtggcctcggtgttggccatgctccagctgacaacaggaggagaaacccagcagcagattcaagcagctatgggattcaagattgatggtgagccacgggacaccaggggaggtgggtggcatgcagaacagacctaccagaagccaaggaaaggctggctctggcttagccgagccaagccccatacagctgtgctgcaggggccaccccatcttcttcccactacactccaagtcactggacccttgaatctccaagggtgtctgaccagtagatttaccgcttattcaccaccgtgtgatcttaacctcgttaagtttgcccatctacaaaatgaggattatttgctgtcctaaagaattcatgagccgggcgcggtggctcaaacgcctgtaatcccagcactttgggaggccaaggcgggcggatcatgaggtcaggagatcaagaccatcctggctaacacagtgaaactccatctctactaaaaatacaaaaaaaattagccaggcgtggtggcaggcgcctgtagtcccagctactcgggaggctgaggcaggagaatggcatgaacccaggaggcagagcttgcagtgagctgagatcgtgccactgcactccagcctgggcgacagagagagactccgtctcaaaaaaaaaaattaaaagaattcatggaattacacttgtgaaatacttagcatagccatcactataggaaaaaaatctaaggccaggcacagtgcctcatgcctgtaatctcagcactttcggagtttgaggcaggaggatcacccaaggctaggagttcaaggccagcctgggcaatacggtgaaaccccgtctctaataaaaatataaaaattagtctgatgaggtggtgcacctgtaatcccagctactcaggaagctgagacacaagaatcactttaacccgggaggtggaggtggcagtgagctgagatcacaccattgcactccagcctgggtgacagagtgagacctgtcaaaaaaaagaaaagaaagagagagagagagagaagagagagaaagaaagaagaagaaagaaagaaagagagagagagaaagaaagaaagaaacaaagaaacaaagaaagaaaggaaaagaaaaaaaaaactaaggccaggcaaggtggcttatgactgtaatttcagcactttggaagattgaggcaggaggatcacttgaggccagaagttcgagacaagactgagcaacagggagacccctgcctctacaaaaaaatttacaaattagccagatgtggtgacacatacctgtagtcccaactactcaggaggctgaggtgggaggatggcttgagcccaggagctggaggctgcagtgagctatgattgtaccactgcacttcagcctgggcaacaaagggaagccctgtctgaaaaaaaaaaaaaaagaaaaagaagaagaaagaaaatatttagggttcatccaggaggcagaggttgcagtaagctgacatcgcgccattgcactccagcctgggagacaagagcaaaactccaactcaaaaaaaaaaaaaaaaaaaaaacaggaagaaaatatttagggttcataacttaagaacagagaaaaatattctagcccaaagaaagggttgggatctgagacttttgaagaaaggaaggagatacagaaaagagatttcatcctggaatgaaatctccctccagagagccctgggaaagcacggtagcccccatccatcagagtggagccccttgtgggggaagtgggctcggctgggaaccctcaattcagcataagcctcacatgtcctctcctctctgtcccggtgcagacaagggcatggcccccgccctccggcatctgtacaaggagctcatggggccatggaacaaggatgagatcagcaccacagacgcgatcttcgtccagcgggatctgaagctggtccagggcttcatgccccacttcttcaggctgttccggagcacggtcaagcaagtggacttttcagaggtggagagagccagattcatcatcaatgactgggtgaagacacacacaaaaggtgagcaggcagggaaaggaaacccatttcctgggcctcaagagaaagggaatttggaaataaatccacatatcccagttgggtgcagtagttcacacctgtaatcccagcccaacactttgggaggtctaggcgagaggaaggcttgaggcctggagtttgagaccagcctggccaacataacaagacctcatctcttcaaaaaatttaaaaaccagccgggcatggtggtgcacacctgtagtcccagctacttgggaggctgaggtgggaggatcacttgagtccagcagttcaaggctgcagtgagctatgtttgcaccaccacactccagcctgagtcacagaacaagacctcatctctaaaaaacaaacaaaaaccaaatccacatatcctaaaaaatgctccttttcagcattctcttctctatggacaaagggctggatgctttaagaaccaaatcttaggctgggcacggtggctcacgcctctaatcctagcactttgagaggccaaggcgggcagattgcctgagcacaggagttcgagaccagcctggccaacatggtgaaaccctgtctctgtcaaaaatacaaaaaattagccaggtgtgttggcgcgtgcctataatcccagctgctcgggaggatgaggttcaaagaatcacttgaacccgggaggcagaggctgcagtgagctgagatcatgccactgcactccagcctgggtgacagagcaagactttgtctccaaaaaaaggaactagacgggttcatttaaacccctgactgcagccctttgacatacatccaattgaggactggggactccgggaaacatctaaaaggcttaaaaactttgtctaacttcagccgggcatggtggctcacacctgtaatcccagcactttgggaggctgaggcaggtggatcacaaggtcaggagtttgagacgagcctgaccaacatggtgaaaccccgtctctactaaaaatacaaaaattagccaggcatggtggcaggcgcctgtaatcccagctattcgggaggctgaggcaggagaattgcttgaaccccggagacagaggttgcagcgagccgagatcgcgccactgcactccagcctggcaatagagtgagactccatctcaaaacaacaacaacaacaacaacaacaacaaaatcgtctaacttcctgatcttcctgatcattgattttcccataggtatgatcagcaacttgcttgggaaaggagccgtggaccagctgacacggctggtgctggtgaatgccctctacttcaacggccagtggaagactcccttccccgactccagcacccaccgccgcctcttccacaaatcagacggcagcactgtctctgtgcccatgatggctcagaccaacaagttcaactatagtaagtccaagagccccttccccacagcccacagcaactgcatctcattcctggggtctcccaaggaatacccaaaatgtcaccctctgagggaggaagaccacagggaatgctcccctttaagggaggagagaccctagaatatactccagctttgacaaagatttcccaagcaggagacatcaggataatgggaacagaagacaggaggtttatcccatgaaggatgaagaagctgaaatccagagattccctcagggccacatttgtccacctgactccagggtctcatcttcgtgtgttgctagtgtgattacctggggatgagaaatcctgctgggggagttgaggttaagaggatgaggactccaggtgctgtggctcacgcctgtaatcccagcactttgggaggccaaggcaggtggatcaggagtttgaggtcaggagtttgagaccagcctggccaacatggtgaaaccctgtctctactaaaaatgcaaaaattagccaggtgtggtggcaggcgcctgtaatcccagctactcgggaggctgaggcaggagaatcacttgagcccgggaggtggaggttgcagtgagccgaacgaaattgagccacttcaccccagcctgggcaaaagagtgaaattccattcaaaaaaaaaaaaaaaaaaaaaaggatgaggactgggatgaactggtggctgggtgtggggaaaatggaagtgaaggaaggccaaaagagacagagaaggcctggcgcggcgactcacgcctataatcccagcactttgggaggctgagaagggggattgcttgaggccagaagttgaataccagtctgggcagcatagcaagaccctgcctctacaaaaaaaaaattttttttaattagccaggcttggtgacatgcatctgtagtctactcaagaagctgaggtgaggccaggcacggtggctcacgcctgtattcccagcactttgggaggtcaaggcgggtggatgacctgaggtcaggagttcaagaccagcctggccaacatggtgaaaccccatctgtataaaaatacaaaaattagctgggcatgatagcaggtgcctgtaattccagctactcaggaggctgaggtgggagaatctattgaacccgggagggggaggttgcagtgagccgagatcatgccattgcactccagcctgggcgacagagtgagactccttctcaaaacaaacaaacaaacaaacaaacaaaatacagaagctgaggcgggaggaacatttgaaccggattcggaggctgcagtgagctatgattgcaccactgcgctccagtctgtgtgacagtgagaccctgtctcttacacacacacacacacacacacacacacatgcacacacacagagagagagaaattagaagatactgaattggcagaagagaagggaaatagaaattaaaatactgaataggggagcagtgaacaggggatacccaaaagccaagagcgagagagagcctggcttccagaaatagtggagaagccaggagaactaggtgaaaacccagtgctgggttgccatcagcgagagctggagccatttccaacgaaccatcttgtcgtcttcacagctgagttcaccacgcccgatggccattactacgacatcctggaactgccctaccacggggacaccctcagcatgttcattgctgccccttatgaaaaagaggtgcctctctctgccctcaccaacattctgagtgcccagctcatcagccactggaaaggcaacatgaccaggctgccccgcctcctggttctgcccaagtaagccaccccgctatctccccgacctaccaacccctctctcctggctccctaaagtcaccgcccccaggttgaatttcccagatctgtgatgcttgcaggacatgcatgtgtgggaggctgatgggaaactgtggcctgggtttgattatgagtcttgcaatcatccctccccctgtttctgctggagggcaggggacagctcttcctgaccacacccccacattgactatccccagaatacccagcaaaagcccccaaaaggagagtcagagaaatgagggaggtgggggcccaatcagtccacatctacttagggtcgccccatcagcacttccatccccaaccctttcaagtcaacatccaaacaaaagaaatcacttccaaggacggagcagctcaaagcgcagcttctagctggggttccaagaaagcagatttttcgaaatccttctgcagaaggaagcaaagagattttttgaaatctttctgcagaaggagaaggctggagctggggaactccagaattatagggaagcctcccaccacgctcatcccaaatttccggatgctataatgccaggcttggggaaagaggagaatttagttggttagctggtgcgtgctctcacttgcatcctctctcttcctcttttttttttttctcctctctctctggctcataaaaatggaggtaattagttgtgccctggtgagaagcagagagtgcacaaaggccccctgcttgagtcctcttcagggttagctctcagaaacacaatctgcagaacagatttttgttccaacatccttgcaggagaatttgcccttagcttcccccaccccagccaggctgaataaaattatgctgaaactactgtcttatttgaggaaagtaattagtcataggtgggagggggtggggagattgcagaagaatgttcatgaatattaggattttcagctctaaggggggactttgtaaacagctttagaagaagaaccaggccggctgggtgtggtggctcatgcctgtaatctcagcatttggggaggccaaggcgggcggatcacttgaggtcaggagtttgagaccagcctggccaacatggtgaaaccctgtctctattaaaaatacaaaaattagccagccgtggtagcgagcgcctatgatcccagctactccggaggctgaggccagagaatcacatgaacctgggaggtggaggctgcagtgagccgagatcacgccactgcactccagcctgggggacagagcaagaatctgtttcaaaaaaaaaaaaagaaaaataggaaggaaggaaggaaaggaaaggaaagaagagagagagaaagaaagagagagagagagagagaaagaaagaaagaaagaaagaaagaaagaaagaaagaaagaaagaaagaaagaaaaagaaaggaaagaaagaacgaacgaaccaggcctccctctccaaccttcacctccgtccctattctggccacttgattcgggggacacctggtaggggatggggaaaggtgggagctgccagccagaggggaccccggcttgagcagcctcttgctgctatctgcaggttctccctggagactgaagtcgacctcaggaagcccctagagaacctgggaatgaccgacatgttcagacagtttcaggctgacttcacgagtctttcaggtaagaagactttcctttgcattttctcaccccagtggactgcgggggcccctaagaggaaaaaggaacctctccttgagagcggcagctgatctaatcctgtatccacatctgtttcagaccaagagcctctccacgtcgcgcaggcgctgcagaaagtgaagatcgaggtgaacgagagtggcacggtggcctcctcatccacaggtgagtctggctcaggtgaggctccacgggtgtcgcctccatcgcccttcaggataactggtccccagacccggaaaggaccccgcagccctctcggcacagagcagctctgtctgtgctcagccatcacccactccccacctgtttctcagcctggaaaacgggcttgggaccatggaaccctgtttcctcgcctgatggctcctaagttccctgactgtgaaaaggcctcctaaagaaaaacccaagttgttcccacagtgggaagtaaacttaagaaacatgcttatcaggctgggcatggtggctcccacctgtaatcccagcgctttgggggaccaaggcaggtggatcacttgaggtcaggaattcgagaccagcctgggcaacatggcaaaaccctatctctactaaaaatacaaaaattaggcaggcgtggtggcatgtgcctgtagtcccagctacttgggaggctgaggcaggagaatcacttgaatccaggaggcagaggttgcagtgagccgagatcacgctgctgcactccagcctgggcaatagagcatgactctgaagaaaagaaagaaagaaagagagagagagagaaaagaaagaaagaaagaaagaaagaaagaaagaaagaaagaaagaaagaaagaaagaaagagaaagaaagagaagaaaagaaaagaaagagcttatcaataagcccttaaaggatttagataaatgtgtgtaagggaagagctgatccattgctaccaagctcctggaggaaaccaggtctcagaggatgtccctaaacttttaaggttcatattcaggaaaacaaacaacttccagctgggcttagtggctcacacctgtaatcccagcactttgggaggccgaggcaggaggatcgcttgagcccaggaatttgagaccagcctgggcaatataatgagactgtgctctacaaaaattagaaaaaaattagccaggcatggtggcatgcacctgtagccccagttacttgggagactgaggtgggaggatcacttgagcccatgagttcaaggctgcagtgagccatgaaggtgccactgcactcccgcctgggcgacagagggagaccctgtctctaagaaaaacggcgggggtgggggtggtgccagtgccagcatccctctgttctaagacattgtcccttctcttgcagctgtcatagtctcagcccgcatggcccccgaggagatcatcatggacagacccttcctctttgtggtccggcacaaccccacaggtgagcctggaacccatcacgttccacatcctcccacccattctttctctcaggaactagtcccgacagatgcagacatccctctatccctgagagggctctgggcagggaaccataaccctaccctgcttcctgtcccaagaggaggctaccttctatcacccacagacagtgccgggtccccgctctgtgactcaggcagctgcgactccagacagctcactcatctgcctagatctcagtccttccacccacatccagcctgatgagctgtcccactccttctgcttctcaacccccatggttcttccaccctcaggaacagtccttttcatgggccaagtgatggaaccctgaccctggggaaagacgccttcatctgggacaaaactggagatgcatcgggaaagaagaaactccgaagaaaagaattttagtgttaatgactctttctgaaggaagagaagacatttgccttttgttaaaagatggtaaaccagatctgtctccaagaccttggcctctccttggaggacctttaggtcaaactccctagtctccacctgagaccctgggagagaagtttgaagcacaactcccttaaggtctccaaaccagacggtgacgcctgcgggaccatctggggcacctgcttccacccgtctctctgcccactcgggtctgcagacctggttcccactgaggccctttgcaggatggaactacggggcttacaggagcttttgtgtgcctggtagaaactatttctgttccagtcacattgccatcactcttgtactgcctgccaccgcggaggaggctggtgacaggccaaaggccagtggaagaaacaccctttcatctcagagtccactgtggcactggccacccctccccagtacaggggtgctgcaggtggcagagtgaatgtcccccatcatgtggcccaactctcctggcctggccatctccctccccagaaacagtgtgcatgggttattttggagtgtaggtgacttgtttactcattgaagcagatttctgcttccttttatttttataggaatagaggaagaaatgtcagatgcgtgcccagctcttcaccccccaatctcttggtggggaggggtgtacctaaatatttatcatatccttgcccttgagtgcttgttagagagaaagagaactactaaggaaaataatattatttaaactcgctcctagtgtttctttgtggtctgtgtcaccgtatctcaggaagtccagccacttgactggcacacacccctccggacatccagcgtgacggagcccacactgccaccttgtggccgcctgagaccctcgcgccccccgcgccccccgcgcccctctttttccccttgatggaaattgaccatacaatttcatcctccttcaggggatcaaaaggacggagtggggggacagagactcagatgaggacagagtggtttccaatgtgttcaatagatttaggagcagaaatgcaaggggctgcatgacctaccaggacagaactttccccaattacagggtgactcacagccgcattggtgactcacttcaatgtgtcatttccggctgctgtgtgtgagcagtggacacgtgagggggggggtgggtgagagagacaggcagctcggattcaactaccttagataatatttctgaaaacctaccagccagagggtagggcacaaagatggatgtaatgcactttgggaggccaaggcgggaggattgcttgagcccaggagttcaagaccagcctgggcaacataccaagacccccgtctctttaaaaatatatatattttaaatatacttaaatatatatttctaatatctttaaatatatatatatattttaaagaccaatttatgggagaattgcacacagatgtgaaatgaatgtaatctaatagaagcctaatcagcccaccatgttctccactgaaaaatcctctttctttggggtttttctttctttcttttttgattttgcactggacggtgacgtcagccatgtacaggatccacaggggtggtgtcaaatgctattgaaattgtgttgaattgtatgctttttcacttttgataaataaacatgtaaaaatgtttcaaaaaaataataaaataaataaatacgaagaatatgtcaggacagtcactgccttcaccttctccatttcacaccggtggtacaagaaatcagaagcctaggccaggtgtggtggttcatgcctgtaatcccagcactttgggaagccgaggtgggtggatcacctaaggtcaggagtttgagaccagcctggacaacatggtgaaaccccgtctctactaaaaatacaaaaattagccgggcgtggtggctggcgcctgtaatcccagctactcgggaggctgaggcaggagaatcacttgaagccaggaggcagaggttgcagtgagctgagattgcaccactgaactccaggctgggtggcagagcgagactccctctcaaaaaacaacaactacaaagacaacaacaaacccagaatcaaaatcctgttggtccatagacctcatgggtggaagagaccttcctacatccaggttggcccaacatgggggagtccatgaaatggtcacctcagctctgccacaagccccaaggataagttgattctgcccctgggaatcatcctcaaaaaggaaaaaaatgttcccctgccataaactttccacttatgcagatgggcctgctcgtaagtcactgtcactgtgggttcccaactctgttcatgacacttccttccagcaccaaatgcttcccacccctctactcccactccccattcttcaaacccagctcaagttccagttcctccacctaggacttcccatggatccagccaatatcactctcaggtccggcgcagtggcccacgcctgtaatctcagcactttgggaggccggggcaggaagattgcttgaggccaggagtttcagaccagcctggacaacat

SEQ ID NO: 14 - DNA, 13974 bp, Homo sapiens
cgtactggtccatagcctgttaggaaccaggctgcataacaggaggtgagtggcaggtgagtgaaatttcatctgtagttacagccactcctcatcactcgcattaccaccagagctccactccctgtcagatcagcggcggcattagattctcataggagctcgaaccctattctaaactgttcatgtgagggatctaggttgcaagctccctatgagaatctaatgcctgatgatctgtcacggtctcccatcacccctagatgggaccatctagttgcaggaaaacaagctcagggctcccactgattctacacgatggtgaattgtggaattatttcattatatatattacaatgtaataataatagaaataaagcacacaataaatgtaatgtgcttgaatcatcccgaaaccatcccaccctggtctgtgaaaaaattgtcttccatgaaaccagtccctggtgccaaaaacgttgaggaccactgctccacagaatctatcggtcactcttcctcccctcacccccttgccctaaaagcacaccctgcaaacctgccatgaattgacactctgtttctatcccttttccccttgtgtctgtgtctggaggaagaggataaaggacaagctgccccaagtcctagcgggcagctcgaggaagtgaaacttacacgttggtctcctgtttccttaccaagcttttaccatggtaacccctggtcccgttcagccaccaccaccccacccagcacacctccaacctcagccagacaaggttgttgacacaagagagccctcaggggcacagagagagtctggacacgtgggggagtcagccgtgtatcatcggaggcggccgggcacatggcagggatgagggaaagaccaagagtcctctgttgggcccaagtcctagacagacaaaacctagacaatcacgtggctggctgcatgccctgtggctgttgggctgggcccaggaggagggaggggcgctctttcctggaggtggtccagagcaccgggtggacagccctgggggaaaacttccacgttttgatggaggttatctttgataactccacagtgacctggttcgccaaaggaaaagcaggcaacgtgagctgttttttttttctccaagctgaacactaggggtcctaggctttttgggtcacccggcatggcagacagtcaacctggcaggacatccgggagagacagacacaggcagagggcagaaaggtcaagggaggttctcaggccaaggctattggggtttgctcaattgttcctgaatgctcttacacacgtacacacacagagcagcacacacacacacacacacacatgcctcagcaagtcccagagagggaggtgtcgagggggacccgctggctgttcagacggactcccagagccagtgagtgggtggggctggaacatgagttcatctatttcctgcccacatctggtataaaaggaggcagtggcccacagaggagcacagctgtgtttggctgcagggccaagagcgctgtcaagaagacccacacgcccccctccagcagctgaattcctgcagctcagcagccgccgccagagcaggacgaaccgccaatcgcaaggcacctctgagaacttcaggtaggagaaaagcaaactccctccaacctcttacttcgggcttaaggcagagaactcgcctccccagaatctcctccctccatgatcccccgctattcctctattttcttttcctcggacctgcagccttgggtcgaccctgccctaggggtgactgcaggagagcagggaggatggtcaggcgtcaccaacaaccccatcacccagtaacaagaaccttgactctctcagtccctctgcatcaagacacttacccatttcccacctcatgcctgctaacttgaatgaaacaatcgctgggaaagcattaagagaattaaggctgggcactgtggctcatgcctgtaatcccagcactttgtgaggctgaggcaggcagataacttgagcccaggagtttgagaccagcctgggcaacatggcaaaaccctgctctcccaaaaaaatacaaaaattagctgggcgtgctggtgtgcctgtattcccagctacttgggaggctgaggtgggaggattgcttcagctggggaggcggaggctgcagggagccaagactgagccattgcacccagcctgggtgacagagcaagaccctgtctctaaaaatgaatgaaaggaaggaagaaagagagagaaagagagagaggaaagaaggaaggaagtaaagaagaaagaaagaaagaaagaggaaagaggaagaaagaaagaaaagaaagaaaagaaaagaaagcaaatttaaagcttatgcaaatcaaagatgttgtgataattgataattgagtctgggctaaattccccctgggctgcaaaggcagagagtggtaatgacttctcacctgcttttcttctaaggcttttttacgggacacagagggaagggagatggactggattccaagattcccacagggcaagatgggcgaagactccctgccactgcccggggataagtcagtctgagtgagacggagtgggatgggcttagaacctgaacatgtcatggtctcttcctgcaccttgccctagtgttcacttaccacctgcttgcaggaaacaagaagagcagggcccacagctggccagctcccctcccctcccgcctgtcttccagaacgattccttcaccagccctctttccattgctctaggatgcagatgtctccagccctcacctgcctagtcctgggcctggcccttgtctttggtgaagggtctgctgtgcaccatcccccatcctacgtggcccacctggcctcagacttcggggtgagggtgtttcagcaggtggcgcaggcctccaaggaccgcaacgtggttttctcaccctatggggtggcctcggtgttggccatgctccagctgacaacaggaggagaaacccagcagcagattcaagcagctatgggattcaagattgatggtgagccacgggacaccaggggaggtgggtggcatgcagaacagacctaccagaagccaaggaaaggctggctctggcttagccgagccaagccccatacagctgtgctgcaggggccaccccatcttcttcccactacactccaagtcactggacccttgaatctccaagggtgtctgaccagtagatttaccgcttattcaccaccgtgtgatcttaacctcgttaagtttgcccatctacaaaatgaggattatttgctgtcctaaagaattcatgagccgggcgcggtggctcaaacgcctgtaatcccagcactttgggaggccaaggcgggcggatcatgaggtcaggagatcaagaccatcctggctaacacagtgaaactccatctctactaaaaatacaaaaaaaattagccaggcgtggtggcaggcgcctgtagtcccagctactcgggaggctgaggcaggagaatggcatgaacccaggaggcagagcttgcagtgagctgagatcgtgccactgcactccagcctgggcgacagagagagactccgtctcaaaaaaaaaaattaaaagaattcatggaattacacttgtgaaatacttagcatagccatcactataggaaaaaaatctaaggccaggcacagtgcctcatgcctgtaatctcagcactttcggagtttgaggcaggaggatcacccaaggctaggagttcaaggccagcctgggcaatacggtgaaaccccgtctctaataaaaatataaaaattagtctgatgaggtggtgcacctgtaatcccagctactcaggaagctgagacacaagaatcactttaacccgggaggtggaggtggcagtgagctgagatcacaccattgcactccagcctgggtgacagagtgagacctgtcaaaaaaaagaaaagaaagagagagagagagagaagagagagaaagaaagaagaagaaagaaagaaagagagagagagaaagaaagaaagaaacaaagaaacaaagaaagaaaggaaaagaaaaaaaaaactaaggccaggcaaggtggcttatgactgtaatttcagcactttggaagattgaggcaggaggatcacttgaggccagaagttcgagacaagactgagcaacagggagacccctgcctctacaaaaaaatttacaaattagccagatgtggtgacacatacctgtagtcccaactactcaggaggctgaggtgggaggatggcttgagcccaggagctggaggctgcagtgagctatgattgtaccactgcacttcagcctgggcaacaaagggaagccctgtctgaaaaaaaaaaaaaaagaaaaagaagaagaaagaaaatatttagggttcatccaggaggcagaggttgcagtaagctgacatcgcgccattgcactccagcctgggagacaagagcaaaactccaactcaaaaaaaaaaaaaaaaaaaaaacaggaagaaaatatttagggttcataacttaagaacagagaaaaatattctagcccaaagaaagggttgggatctgagacttttgaagaaaggaaggagatacagaaaagagatttcatcctggaatgaaatctccctccagagagccctgggaaagcacggtagcccccatccatcagagtggagccccttgtgggggaagtgggctcggctgggaaccctcaattcagcataagcctcacatgtcctctcctctctgtcccggtgcagacaagggcatggcccccgccctccggcatctgtacaaggagctcatggggccatggaacaaggatgagatcagcaccacagacgcgatcttcgtccagcgggatctgaagctggtccagggcttcatgccccacttcttcaggctgttccggagcacggtcaagcaagtggacttttcagaggtggagagagccagattcatcatcaatgactgggtgaagacacacacaaaaggtgagcaggcagggaaaggaaacccatttcctgggcctcaagagaaagggaatttggaaataaatccacatatcccagttgggtgcagtagttcacacctgtaatcccagcccaacactttgggaggtctaggcgagaggaaggcttgaggcctggagtttgagaccagcctggccaacataacaagacctcatctcttcaaaaaatttaaaaaccagccgggcatggtggtgcacacctgtagtcccagctacttgggaggctgaggtgggaggatcacttgagtccagcagttcaaggctgcagtgagctatgtttgcaccaccacactccagcctgagtcacagaacaagacctcatctctaaaaaacaaacaaaaaccaaatccacatatcctaaaaaatgctccttttcagcattctcttctctatggacaaagggctggatgctttaagaaccaaatcttaggctgggcacggtggctcacgcctctaatcctagcactttgagaggccaaggcgggcagattgcctgagcacaggagttcgagaccagcctggccaacatggtgaaaccctgtctctgtcaaaaatacaaaaaattagccaggtgtgttggcgcgtgcctataatcccagctgctcgggaggatgaggttcaaagaatcacttgaacccgggaggcagaggctgcagtgagctgagatcatgccactgcactccagcctgggtgacagagcaagactttgtctccaaaaaaaggaactagacgggttcatttaaacccctgactgcagccctttgacatacatccaattgaggactggggactccgggaaacatctaaaaggcttaaaaactttgtctaacttcagccgggcatggtggctcacacctgtaatcccagcactttgggaggctgaggcaggtggatcacaaggtcaggagtttgagacgagcctgaccaacatggtgaaaccccgtctctactaaaaatacaaaaattagccaggcatggtggcaggcgcctgtaatcccagctattcgggaggctgaggcaggagaattgcttgaaccccggagacagaggttgcagcgagccgagatcgcgccactgcactccagcctggcaatagagtgagactccatctcaaaacaacaacaacaacaacaacaacaacaaaatcgtctaacttcctgatcttcctgatcattgattttcccataggtatgatcagcaacttgcttgggaaaggagccgtggaccagctgacacggctggtgctggtgaatgccctctacttcaacggccagtggaagactcccttccccgactccagcacccaccgccgcctcttccacaaatcagacggcagcactgtctctgtgcccatgatggctcagaccaacaagttcaactatagtaagtccaagagccccttccccacagcccacagcaactgcatctcattcctggggtctcccaaggaatacccaaaatgtcaccctctgagggaggaagaccacagggaatgctcccctttaagggaggagagaccctagaatatactccagctttgacaaagatttcccaagcaggagacatcaggataatgggaacagaagacaggaggtttatcccatgaaggatgaagaagctgaaatccagagattccctcagggccacatttgtccacctgactccagggtctcatcttcgtgtgttgctagtgtgattacctggggatgagaaatcctgctgggggagttgaggttaagaggatgaggactccaggtgctgtggctcacgcctgtaatcccagcactttgggaggccaaggcaggtggatcaggagtttgaggtcaggagtttgagaccagcctggccaacatggtgaaaccctgtctctactaaaaatgcaaaaattagccaggtgtggtggcaggcgcctgtaatcccagctactcgggaggctgaggcaggagaatcacttgagcccgggaggtggaggttgcagtgagccgaacgaaattgagccacttcaccccagcctgggcaaaagagtgaaattccattcaaaaaaaaaaaaaaaaaaaaaaggatgaggactgggatgaactggtggctgggtgtggggaaaatggaagtgaaggaaggccaaaagagacagagaaggcctggcgcggcgactcacgcctataatcccagcactttgggaggctgagaagggggattgcttgaggccagaagttgaataccagtctgggcagcatagcaagaccctgcctctacaaaaaaaaaattttttttaattagccaggcttggtgacatgcatctgtagtctactcaagaagctgaggtgaggccaggcacggtggctcacgcctgtattcccagcactttgggaggtcaaggcgggtggatgacctgaggtcaggagttcaagaccagcctggccaacatggtgaaaccccatctgtataaaaatacaaaaattagctgggcatgatagcaggtgcctgtaattccagctactcaggaggctgaggtgggagaatctattgaacccgggagggggaggttgcagtgagccgagatcatgccattgcactccagcctgggcgacagagtgagactccttctcaaaacaaacaaacaaacaaacaaacaaaatacagaagctgaggcgggaggaacatttgaaccggattcggaggctgcagtgagctatgattgcaccactgcgctccagtctgtgtgacagtgagaccctgtctcttacacacacacacacacacacacacacacatgcacacacacagagagagagaaattagaagatactgaattggcagaagagaagggaaatagaaattaaaatactgaataggggagcagtgaacaggggatacccaaaagccaagagcgagagagagcctggcttccagaaatagtggagaagccaggagaactaggtgaaaacccagtgctgggttgccatcagcgagagctggagccatttccaacgaaccatcttgtcgtcttcacagctgagttcaccacgcccgatggccattactacgacatcctggaactgccctaccacggggacaccctcagcatgttcattgctgccccttatgaaaaagaggtgcctctctctgccctcaccaacattctgagtgcccagctcatcagccactggaaaggcaacatgaccaggctgccccgcctcctggttctgcccaagtaagccaccccgctatctccccgacctaccaacccctctctcctggctccctaaagtcaccgcccccaggttgaatttcccagatctgtgatgcttgcaggacatgcatgtgtgggaggctgatgggaaactgtggcctgggtttgattatgagtcttgcaatcatccctccccctgtttctgctggagggcaggggacagctcttcctgaccacacccccacattgactatccccagaatacccagcaaaagcccccaaaaggagagtcagagaaatgagggaggtgggggcccaatcagtccacatctacttagggtcgccccatcagcacttccatccccaaccctttcaagtcaacatccaaacaaaagaaatcacttccaaggacggagcagctcaaagcgcagcttctagctggggttccaagaaagcagatttttcgaaatccttctgcagaaggaagcaaagagattttttgaaatctttctgcagaaggagaaggctggagctggggaactccagaattatagggaagcctcccaccacgctcatcccaaatttccggatgctataatgccaggcttggggaaagaggagaatttagttggttagctggtgcgtgctctcacttgcatcctctctcttcctcttttttttttttctcctctctctctggctcataaaaatggaggtaattagttgtgccctggtgagaagcagagagtgcacaaaggccccctgcttgagtcctcttcagggttagctctcagaaacacaatctgcagaacagatttttgttccaacatccttgcaggagaatttgcccttagcttcccccaccccagccaggctgaataaaattatgctgaaactactgtcttatttgaggaaagtaattagtcataggtgggagggggtggggagattgcagaagaatgttcatgaatattaggattttcagctctaaggggggactttgtaaacagctttagaagaagaaccaggccggctgggtgtggtggctcatgcctgtaatctcagcatttggggaggccaaggcgggcggatcacttgaggtcaggagtttgagaccagcctggccaacatggtgaaaccctgtctctattaaaaatacaaaaattagccagccgtggtagcgagcgcctatgatcccagctactccggaggctgaggccagagaatcacatgaacctgggaggtggaggctgcagtgagccgagatcacgccactgcactccagcctgggggacagagcaagaatctgtttcaaaaaaaaaaaaagaaaaataggaaggaaggaaggaaaggaaaggaaagaagagagagagaaagaaagagagagagagagagagaaagaaagaaagaaagaaagaaagaaagaaagaaagaaagaaagaaagaaagaaaaagaaaggaaagaaagaacgaacgaaccaggcctccctctccaaccttcacctccgtccctattctggccacttgattcgggggacacctggtaggggatggggaaaggtgggagctgccagccagaggggaccccggcttgagcagcctcttgctgctatctgcaggttctccctggagactgaagtcgacctcaggaagcccctagagaacctgggaatgaccgacatgttcagacagtttcaggctgacttcacgagtctttcaggtaagaagactttcctttgcattttctcaccccagtggactgcgggggcccctaagaggaaaaaggaacctctccttgagagcggcagctgatctaatcctgtatccacatctgtttcagaccaagagcctctccacgtcgcgcaggcgctgcagaaagtgaagatcgaggtgaacgagagtggcacggtggcctcctcatccacaggtgagtctggctcaggtgaggctccacgggtgtcgcctccatcgcccttcaggataactggtccccagacccggaaaggaccccgcagccctctcggcacagagcagctctgtctgtgctcagccatcacccactccccacctgtttctcagcctggaaaacgggcttgggaccatggaaccctgtttcctcgcctgatggctcctaagttccctgactgtgaaaaggcctcctaaagaaaaacccaagttgttcccacagtgggaagtaaacttaagaaacatgcttatcaggctgggcatggtggctcccacctgtaatcccagcgctttgggggaccaaggcaggtggatcacttgaggtcaggaattcgagaccagcctgggcaacatggcaaaaccctatctctactaaaaatacaaaaattaggcaggcgtggtggcatgtgcctgtagtcccagctacttgggaggctgaggcaggagaatcacttgaatccaggaggcagaggttgcagtgagccgagatcacgctgctgcactccagcctgggcaatagagcatgactctgaagaaaagaaagaaagaaagagagagagagagaaaagaaagaaagaaagaaagaaagaaagaaagaaagaaagaaagaaagaaagaaagaaagagaaagaaagagaagaaaagaaaagaaagagcttatcaataagcccttaaaggatttagataaatgtgtgtaagggaagagctgatccattgctaccaagctcctggaggaaaccaggtctcagaggatgtccctaaacttttaaggttcatattcaggaaaacaaacaacttccagctgggcttagtggctcacacctgtaatcccagcactttgggaggccgaggcaggaggatcgcttgagcccaggaatttgagaccagcctgggcaatataatgagactgtgctctacaaaaattagaaaaaaattagccaggcatggtggcatgcacctgtagccccagttacttgggagactgaggtgggaggatcacttgagcccatgagttcaaggctgcagtgagccatgaaggtgccactgcactcccgcctgggcgacagagggagaccctgtctctaagaaaaacggcgggggtgggggtggtgccagtgccagcatccctctgttctaagacattgtcccttctcttgcagctgtcatagtctcagcccgcatggcccccgaggagatcatcatggacagacccttcctctttgtggtccggcacaaccccacaggtgagcctggaacccatcacgttccacatcctcccacccattctttctctcaggaactagtcccgacagatgcagacatccctctatccctgagagggctctgggcagggaaccataaccctaccctgcttcctgtcccaagaggaggctaccttctatcacccacagacagtgccgggtccccgctctgtgactcaggcagctgcgactccagacagctcactcatctgcctagatctcagtccttccacccacatccagcctgatgagctgtcccactccttctgcttctcaacccccatggttcttccaccctcaggaacagtccttttcatgggccaagtgatggaaccctgaccctggggaaagacgccttcatctgggacaaaactggagatgcatcgggaaagaagaaactccgaagaaaagaattttagtgttaatgactctttctgaaggaagagaagacatttgccttttgttaaaagatggtaaaccagatctgtctccaagaccttggcctctccttggaggacctttaggtcaaactccctagtctccacctgagaccctgggagagaagtttgaagcacaactcccttaaggtctccaaaccagacggtgacgcctgcgggaccatctggggcacctgcttccacccgtctctctgcccactcgggtctgcagacctggttcccactgaggccctttgcaggatggaactacggggcttacaggagcttttgtgtgcctggtagaaactatttctgttccagtcacattgccatcactcttgtactgcctgccaccgcggaggaggctggtgacaggccaaaggccagtggaagaaacaccctttcatctcagagtccactgtggcactggccacccctccccagtacaggggtgctgcaggtggcagagtgaatgtcccccatcatgtggcccaactctcctggcctggccatctccctccccagaaacagtgtgcatgggttattttggagtgtaggtgacttgtttactcattgaagcagatttctgcttccttttatttttataggaatagaggaagaaatgtcagatgcgtgcccagctcttcaccccccaatctcttggtggggaggggtgtacctaaatatttatcatatccttgcccttgagtgcttgttagagagaaagagaactactaaggaaaataatattatttaaactcgctcctagtgtttctttgtggtctgtgtcaccgtatctcaggaagtccagccacttgactggcacacacccctccggacatccagcgtgacggagcccacactgccaccttgtggccgcctgagaccctcgcgccccccgcgccccccgcgcccctctttttccccttgatggaaattgaccatacaatttcatcctccttcaggggatcaaaaggacggagtggggggacagagactcagatgaggacagagtggtttccaatgtgttcaatagatttaggagcagaaatgcaaggggctgcatgacctaccaggacagaactttccccaattacagggtgactcacagccgcattggtgactcacttcaatgtgtcatttccggctgctgtgtgtgagcagtggacacgtgagggggggggtgggtgagagagacaggcagctcggattcaactaccttagataatatttctgaaaacctaccagccagagggtagggcacaaagatggatgtaatgcactttgggaggccaaggcgggaggattgcttgagcccaggagttcaagaccagcctgggcaacataccaagacccccgtctctttaaaaatatatatattttaaatatacttaaatatatatttctaatatctttaaatatatatatatattttaaagaccaatttatgggagaattgcacacagatgtgaaatgaatgtaatctaatagaagcctaatcagcccaccatgttctccactgaaaaatcctctttctttggggtttttctttctttcttttttgattttgcactggacggtgacgtcagccatgtacaggatccacaggggtggtgtcaaatgctattgaaattgtgttgaattgtatgctttttcacttttgataaataaacatgtaaaaatgtttcaaaaaaataataaaataaataaatacgaagaatatgtcaggacagtcactgccttcaccttctccatttcacaccggtggtacaagaaatcagaagcctaggccaggtgtggtggttcatgcctgtaatcccagcactttgggaagccgaggtgggtggatcacctaaggtcaggagtttgagaccagcctggacaacatggtgaaaccccgtctctactaaaaatacaaaaattagccgggcgtggtggctggcgcctgtaatcccagctactcgggaggctgaggcaggagaatcacttgaagccaggaggcagaggttgcagtgagc

SEQ ID NO: 15 - DNA, 27368 bp, Homo sapiens
aggctctttaggaccgtgataatgataaaaaaagattgagaaacattactatggagaatatgattttgtatatgaggctcaagataaagaaagatcttaaggagatagattaaaataaacaaggcaatggtttttgagaatgaatacaaagcccagcatccaggtaaaattaaaagtcaattgtacaaacctagaatcaggcacatagtagtagttcatgcaagaaacaacagaggattttgattaagctacgggctgcacactgagtagatttatgctcaaaagacaactagagtggcaaaaagtctgtaaaccatgtcctatgaggcatggtttgaaagaactgaggatatttagcccagaggatgaatgacttggcgtgacatgctagatattttaaagggctgtcatgtgaaagaggaattagaaattgtttgtgtgaagctattttttcctcaacctaaggaagacccttttaacaattaggaaatgatcaaatatggaataagctgttttgcatagggatgagtttctcagactgtcagaaggatatttctgcactgagcaagaggataaacatggcttctaaggttccttccaattcccaggttctgtgattccctgctagatttacaagtatgaaggtggaaaagatggctaaagaatatgagcccagacaaaacatcctccgttgattttaaaaccaaaattccataccagggatatttgcttgaggactatctcactgtctagctgaatggttgccaatatttagaggcctaattgccctggacccctgtttccttgtgccctacctctagctgaatttccatcttggcatagaaggtacagagggagttgtagggaaatgccaagaaggagatctcagagaccagagttatagaaatgctcagaactgttttatgaaaacattggtatgggcccagtgagtggagagagaacatgcttcctgtccttgttgagctctatgttgctcacttgttatccccaaccccccttatctcttacatcttcaactagccagcaggagggttggtgcaggaggaggggtagaaggaagtaatttcaggttcaagggttaacagtacactggtcaggaaagctgaggaatgagatgatgagcatctttacagtttgtgaaaatgaaacaaacaaaacaacttgagaatcatgttcctggaattgtgtccaaatgaatgtctcaggttgaagggaccaggactttgactgtgatgcagtatagtatttatagggatcttgcttggcctttcagagcaaaaacaattattttctctcctctcacctaacacagctgtgcagaatcttcatagcctggttgctagaaattagggttcttatagctgctgtggaataaactccattcactttcctcttaacaatcccttctctctgtctttgaccaaatgttacctgttgtttcacgaagtgaccttttcttcattgcaccccattagctgctctttcactcccagtcacttcctgaagtcctcatcactatcacagatctgcctaccagggccatgtctgaccagggccatgtctgcagcctagcccatattaactttgccaacacttcaccatttttctctgcatgtcctctctctagtaatgtgcatgtctgtgatattaaccctgggacagaaaagtaagaaatctatcagaatcctcgctgaaagtcttatttctccttgaaaccgaaagagctttcaaacgtggcttcctgagtttttcagtttgctggtgggtgggtctggagtgggcatcccgtctgcacatctggtagaggcactttccacattttcctcatgactcaggatcagtttctgactgctgggcggggcaaagcctcctgaagttgctgcgaggcacctccccctgtgagcagagcttggtacagcccaaatagttttcaggttaagaaagccagaatctttgttcagccacactgactgaacagacttttagtggggttacctggctaacagcagcagcggcaacggcagcagcagcagcagcagcagcagcagcagcagcagggctcctgggataactcaggtgagtagagagggaattcgcaaacttaccctggagttttatttcctggataacttagcgtctaagaaagatgaagaaacttcaactttgtagttaaccaaactccacagctatattttatggcttgtctggatcaaatatgtgcccgttaatagcagtttgagaacttcaaaaataatggaatttttggttggttattttgaggggtgtgtggggtgatgattgtggttgtctggcaatgaaacttttctggggatatctggtcagttttttgtgtgtgtgcacacacgcgtgcatgtgtatgtgtttgccttctgctacccaaaatacctggtaagtgaggaaaaatcacaggggatggtgttgagggggagaagcgtggctcctttcagggcctccttctagcttctgctgacccacagctgtgggaaaattattgaaatgcgagcaaaatcttggagccacactgtgtgcaaaaggcctgtgaactctggtaggagggtgagcaggctgtgcagtgttgtacaggaggaagtggtggccaagtctatcttaactccctgtctgcacagccagtggtcttcctgccctggtgacaggttgatcttggctattccattttcagcctctggcctggctttgttcccctctgattccagctttggtttaaactttgatttcaagatggggctccatcctccactcccaggccaagtacactgttctagggtcttcactggaccacttgatcagaactggctttgggtgggggacgggaaaaaggagcggtgcattgtaatggaaacaattggttctgaggatttggaactgtaagtttgctgaaaagcacataggaaaactcagcaaattctgctgtcctaacaattacttctggcttcaggataaaacatcctggtttgtattattggtgtattgaaattcagctaatgcctcatttgctaatctttattgtgaaagtaagaacactttacagtctgaagtaataaacaaaaaaattatttgtggactgctaattaactcttttattcctctggaagtttgtgtgtgtgtgtgagcatgcttatgtgcacgtgtgtgcctgggtgtgtgtgaatactttgtattcaaatagcgttctttatttgtccttagactccctagcagtctagggaaaaagtctaaacacttacatggtcaggaataggttaaaaagcaggctttccatatccttgggagttttcagttcctaaattaaaagcagaaaaagtccctttgtgaccccaaaacagtgtttctttgattagccttgatttgaaatcatctcaccttctgacagcttgcaattcaaaaacaaaacttctaagtgcattcttgtgagaagagtacaatatgaatttttaaaagcaacgtcttgcttgacatattgtgtctgcatgtttgccctcctccccaccttacaacaaattgtggtttaaaaaaaaacgttgggaggtcccagttttagtgtgggctctgtcactaactacataaccctgggcaagtgcctttaccttacaacaaaagaaagaagttgtactaagtgatttctaacagactttccaacataacattctataaaatcagaatttgattcttgaaaggctggaaaagtagacatataggatgggcttattcggccaaaagggcaagtcagccaaaaaaggaggggtgaaatagggaggtgtagagaatggtggaggggcaatttttatattagtcttttaaatgttggtgcatgtcttatttaaagcacatgatcaaatttcattagtttcccctaaagacagaaaagaaatttaacttgttaaaataagtgcttcctaatactactgccctgctttagccttatctttaacaataaagagtatgttcacatacataatttcattacattctcccaataacactctgaagtagacagggaagctaacatattcccattgtgctatgtggaaactgagggactgagatgttatgtatactaaatggtgatattttggatttgtttctggatcttgtaaccacctgtgttccttttatcattttgaattgctttttattttttgatagagttattgagcaaccgaattaaaattgtgtcctcttttttttcctttgaatggctttgaacagactcttctctctgggccagtaggtacatcctatataaggcagtgggctggatcagaggatctctgtggtcctttttagacccagaatatctggttagaagtttgaatctgaacagccatacataagtcctgtggttaaatgcgtgcccatgtatgtaagctatgactctgcctgtgtacctatgaaaagcactattctctgtataccatgtggatgctgaatttgtattactttttcctatccaagtcccttttctctcaccataccaccccccaggtgtggggataagggatgtggattgtgggtaaaagtggtgcctacttcatgccagggcagaattgggtcttctgtattcaatttgtctgcaaacttttattgattttatcttgatttttgctccaagtacagaacagggatgaaactgaggaaaaggagaaactaggcaggaacaatgcctcagccatgccctctctccctctccccattaagttccctcatgttctctcccactcacctaaatccaaagtggcttgtgaaccacagacaggatgtattttatcagatttttttagagcaaaatatgctttttgctctaaggctaacccgcaggttaagaagcaagagattttgctttcacgacttgcctagcttcctcaagctttccagtccagtgagtagaaaaaaaatacctctctctttaaactgcagccttgtattctacgtggcagtctccctcaacttccctggcaattctcaactttctgcactctgggcccgctcctatcctttgccttggcagacacggttgtcctcatattctttctcaaagtggtggatctgaattataataatattgcctaagaccattacctcaatgctaagccccaccacactctgcctcacccaaccgctcattccactagccctcaggccacagggtccctcttctcaaatgtccacattgcctttgttagctagaggctctccttggtttatattcaaatccctgggtttatactcaaagccctaacttttatcttgtctcccgactttcctaatatgtgatctttaacgtaagggctctcccttccccatcgccatcgggtgcaatagaacagaaaggagggagtgttcccttctctgcactcatccgttccaacagagtaagttgtttatgacaaactcaacttacaaatttctgggtttccaaaagtattctgatgtttaaatgatgaacccgccgatgtaaagagttcagattctcccatgaacatcaaaccatgaaaataaagaaccttttcaatgtctaccatggcaataaattctaggcagaatgcctcaaagttgagtatcatgtttgctttggaggatttcctcatttgaactaaaaaatcctttctctaagaaggcagtgaccaaaagaagcagtgtggtgtgatggaaagctgcacactgaatctggcattgcacagaacctggatttgagttaactctgccattttctagctactgcttctctgagctgccatttctgcagatacaaaatgaagggcacagataatctcattaaacatgactgctatgatgagaacccgaactaaaatgtaaaatgcacatttcaaacaagaaattgccatgcaatcactaattctccacataagacatttatctgttcaacaaacattttctgaacaatatttgtgtgcccagctcaatgctaggcaatgagagggcttcagtgtatattttgcatttatggatcactttctacttattcaaaattcctcttacaccaaccatctcattaggtacacccatggtgtaagaggggcagggtagataacctcactttcctgatgaaaaatttgaggcacaaagagaacaaggtcacagagcaaatggatcacagttctgttgcccagtcagaaatgcgggtcacttttttttttttttttttttttttttgagacggagtctcgctctgttgcccaggctggagtgcaatggcacgatctcggctcactgcaacctccacatgaaggtcacttctactctccaagtccgagaggacttgggactacagttgtactgtagtggaagttcaggctcatagtctgctcttctttatttactgtgtgtccccagaacacaggcaccctgacccaaaaggtgttccgtcaagctgtaatctatccatgtgagctgtacattctgcctctgaaagagtctattgggatcacatgggctttaaaaatcaaacctgattttcctttcaattggtgctacttctgtctgtacacaggccctctttataacagggattccttttgcaggatcttgcctgccttgccatttgaccgagtagtaaggaagacctttgaaggcagaacaggaaatactcatttatccagaatgtccagggactaggaggttctggcaaactaaatattctaattgccccaggcttttccacatttacagtccccaggctctggcaattcaccaaaccttctagggaaagcaagaggcgcagtagtgtttgttgtaagtttgagcacacaagaaaattgggatccatttgtaacagcctccagaaaggagtctgggcaaacattcaggttggctctgatgctgcataactaaaaatttttactgataccatccatgctttcaaatacaatgaagtacactttaatatttaaaacacatgagcagacaaatctgatgaaaaaagggacatcagtattttgcagtgtccccacagctctcaattttaaaagcaattgccaataaataaggctatgaaaaaaatgtggttattctcagcttcttattccttggattcagagaaagggtaagtttgttgtacatacattgcaaataacattgtaataacattgcaaacatttaaattaaaaattgttatggttttcaaatggggaaacttctttaccagtgaggcatttcaatgtgatactgaaaggatataaaatgaactagtagagaggtctgatcaatatttcactttttataaaacagcgactgcctcacagatataccacacagatactccttaaagtgctaacgtattctccttattttttagcagacattctgtagcttagtcaggttttttttgtttcaaccctcctgtgattatagaatatagactttagttatttctaaaatacattttgaaatagttgacaccatgtaaatttcacaatctcattcttatttactgttgaatgccaggagaggatcattaaaatcattacaaatctttgtgaatcaagaaaaagcactgaaaaccctattatcaccccaaagctattgaaaatcaaatttgcctttcaaattatcttcctaaaaaccagttgttaagagcacttgagtgtggggcactctgatagacattgcttgaagagccactatatgaattctctgtttagccatgtaaggtttttgtttttcctcctttttttttttttaaagaaaagaaagcaagagtgtattgccatgggataacaatctatagcccaccaaattagtgtaattgaatttcagagtctgccttttatcacaggcaaaggattatacattagacttttaagaagaaagaccatacaatctttctgtctttccttgtctttggaggccatctgctgagctgtttcttgcagtagtcttcctggccaataataaaaaatgcaaagctctttaaatgacaagacggaagaaattgtgtaaaaagacttgctggaatggaaagaggctgcttttcccctcatgcacaaagtgtgcgactctccagggcaccaaattattctgactacagtaaagtgatttttcccttatcttcaagttgttctctgccttgaactactccctgctggtgtaaatggaagacttctctttaaattataatgaatcacatttaattcacaatctttacttttattattgatttttccccaataagattaaggcccatattgccccatttgacagataaagaaactgagacccaaaatggttaggtgccttacccaaggccccatactaattagttgcggagtgtggacacttctttctttgaaaatggtgacatttcctttaaagccaaactagaagtgcctagctctgggaagaagtcactgggatgacggctgtttgtctaatctcaggtaacccttaaaagacctgagaaattcttccttcaaagacaaaaattttcctcattctaggcatagttcaacactatgggtcctcctctgaagctcttcaaaaaccagaaataccaggaactgaagcaggaatgcatcaaagacagcagacttttctgtgatccaacatttctgcctgagaatgattctcttttctacaaccgactgcttcctggaaaggtggtgtggaaacgtccccaggtaactttctattttacacattctgtctccttgacctccttcatcatacttctacgtgatccactgtttcacttacaaagcctactgtgtagaccaatttagaagttaaccttccttccttcctttctttttttttcagctttattgaaatataattaacaaataaaaattgtgtatgttatggtgttcaatgtgatgttttgatatacatatacattgtgaaataattaccacaatcaggtaaattaacgtattcatcacctcacataaagaaaactttataatgaaagttccatggatctgtgctcctggctctagcttggagtcctgaattttagtcaaattttgacagatttacttagaaaaaacaacaaaaaaatacactgtacctttttgagattagctatttaaccttaagcaaattaatctaagatccattcaaggtgttctgtgtatcaatagttgttttgtttttactggtgagtagtaatttatgataaggatatgccaaaatttgttcatctagtcacccactaaagggcattggggttggttttagtattttttactgttacacataaagatgctatgaatatttctgtacaaaaaacagagagatatgccaaccttattttctcttggaagttcatttgagtaaatatggtaacacaaaaagcaactatgctcttgcctctttactgagttacctgtcataacaatttaaatgtaatttcagaccagtgaggagaaaaactccttataaagtgagcataaatgagacaaattttaaagggagaagatgaatttttcatgggggcaagaaggcttctttgctgctctatggacactgtcatctgtatcatcccacaactggacaagtgggcttcaagtagaattgtaggtctttcaccacctattagtagtaactattaatagttgttgtggttctctgtgcatcatctgtatgttgtgtctctaaagcaagtttcagaaccctttcactagtcctacatgagcaggagctcagtgtataaaacaataggatgatggagtctggagaataaattgcaaccttgctatacctaaagggtataactggatagaaggatattgtacctaaactccttctcaatgtaggtgatgaggtatataggccacagaaggatgttgtgaaatgcaagttcttggaacttcataatatcctgaagacattcaggtcctatttaatgaggttcctttctgtgtactattatggaaccatctcaggcatcatctcaatgtttgcctccctcaagtaacccttttaccaactatcacttttagttgcaatttccacagcttaaattcctaaatggagttctgccaagagctacttctgtttatgcacgttgctaccatgtggtgtcaagatacactggttacatcaagacttgtttactatgcaactcaaaggatatctcttagtttttgcctataaagaatgacaaccattgaaagtatgagactgggagaagttcgctctgtctgaaggaaaattacactcctcctgcctttctgtgtctgcagttattgacattccagcggatcacttagctgacctgcaagaaaaatctaggaaatgagcagaattcattaaccaatactttggtatgcagacaggcttttttttttatttgcaaaaatacatggagaaaaatagagatacgttgtctgggagccactcttatgaatggatggtgataaataaggggcatccctcttttctgatgcttggatatgaaggaaaagatgtcaatagggcaaaagtagctaaaaaggaagcaggaaattaagagaggtgtattgggtaggtgtctttctgaaataggacagacttgaacatatttataggctaagaagtagatggtaaagaagaagaggttgaagacacagaagagaaaagggatgattgataggggtgaggtggaggaggtgggaggagatccgatgggcagcaaaattgcaagccaacatgaagccattccccagaagtgcaccaagcagacagtgtttcctgtactggctgtctttagacatatccttccccctctatcttggctcagtccattgtcctttgccttcatcctccaaattctgtggattgaatcctagatggattagcagggaaggaaaaagtcttaacaaccacggcattttgcctctaaggcaaacaatagcccttctaaagtgagagaaaatcagagagagaggctgaacagtggggatgggtaggaaaaagaatcaacagtcatgacatgcgtactatgggccagatactgtgtttgaagttttctatacattattttacttcacccttatttaccatggcttagcaaagtaggcatgttaaaagttactttgatgcaattctgatttcctagtttaaaaaatagcagtagatacatgcccattatatatctttatataaaaagaaactgtgtctttaagagaaggtaagtatttgctcagggtcagactgctaacaagctcggatttgcatccacgtttgactgcaaagcctgcataagttttcactctatcatgctgtcatatcagggagatagatagagttagttgtttgtgtcccctgttttcaccaaaataggtagcttccctccagtcagttctcatattcctcttcactgtgttgatgccacacttccattaattgttccacactctcccgtttgagagcatggtgtttgcttaatcttattaagcccaaagggagggtcactagagaaatatttactgaacacttactctatgccagccttggtgcaagacacagacatggcctgtggtgaggcactcccattctagttggggagatggatattgagctatcaaatagttaaaaaagaaatgaatgttggatgtatgaaatgctattttcagtcatatggacagtaaatcatgtagaatttttgaagaaggggaggttaccatagattggaatggttggagaaggggcctcttgtggggagcaggagaaaaaaacaaggttctggaccaccatctgagcctcctccaaaagctgtggattccttcccagccagagtggaggccaagcctgtggtcaagaaccacgtcaaagttctctggcctcccatcaggaaagctgagagacagagctgggcctctctgaattggctcaggaaggccagatgagccgttggcctcccccacctcattggcaaggttgagatcctggtttgcagcgaaacttacagacatcttgtcccttggcatgccatgtagctgcacacttaactggggctattttctgaagtctccaaaatggaagcaacacgattaacctgatattttctgtctttttcctttctcgtgttgaaggcttttgccttcgtaagcctccatgcctgcaaacaccactgatagtttaacaaactgactccagtcaagctccgcccctcgccgccttggcgcccccccggccccccgccgccccattcttgggcaggattgagttcccctcctcccacttgccacttctttgctgtgttttaaggagcctcttcagatgacaggaattatgaatgtcttgcaattgttcaatgccagatcatctgcccataccctccagaggaaagttcttcttaatttctccagccgtctattggcctcagctgttgtcctagctttctgaatacacaggtatattacctgagaccatgtgctcctggacttttctattctcctggagctcaacatatatagtcttcataaattataaggtctaacttatactgagttacagtgtgatcataagactgccggtaggatttttaggctgaaatctgcctgccaaattcccacagaaaatctcttctccagctccctccagccactctcccctcctacccacctctggcgtttttccttactgactcatatctacctacaatagtgtcttaaaatcagacacatctaatccctgactaaaaaggagtaaagcctcatgggaatttgcactgtcagctgtgaggaaaaaagggcacctgcacaagatctgtcagctctcctgtcaagttttaagttcagccttcgctaccattgccattgcctagtcttcccctctagaatacattcccctggggccattttactacattgtctggttgagagtgggagggtgatgaggctctggattaaaattatggtagtaggaatggaagggaaaggcagataagggaagacattagaagcagaatatacaggcttgggtgacagcatatgagggaaccgtaaggaaagaaacacttttctctctgtgctaatagaaatttccaaccaccagctgaatgcaacacctaggtatagtagttttggcctagtctgctcaagaatttccttttcttcccagagactatatcaccccatgtgagtagtcctaagtgttttccactgtttacacaattgaagagagttgaataggcccatagtcttttctccaactgtcctatttattttaaattatgcattaacaaactttaacagctttatcgaagtgcaatttatatattgtgaaactcacctgttttaagtatacaaagcaatgatttttagtaaatttaaagttgtgcaaacattaccacaacccagttgtagaagagctgcatcacttcaataagatcccttgtgcacatttgaagggagtaatccctccaccctacccccacccctgctgcagccaaccactaatgtacttttggtttctatccagaactgcctattctgtacatttcacttaaaatggaatcataaaagtaactggcttctttttcttagcataatgttctcaagagtcatccatgttgtagcatgtatcaatttattccatcttattgctgaacagtattccgttgcatagatatataaattcttcccaaaaaagcagttcgggatctgtgccttgagtctcctagcagaatcctgaaggttaaagtgagaaaatgattacacagtgatttggtggcccagtttggaagtggaggttgggcctaagatcctattctattctccatattgagctttccttggatgggttaggaaggaagagactattttattgataataaaatcttcatgcagaattgaaactccccagtaggaaaagtggacttcttgagaggctggtgcaacattagtccctgagcctaagtccacctataaatgctccatctgggggatggttcaattttctaagtaagataacgactacttggactagctcacaaaaccctcagttcctgaatagcagttctgtgcaaattagcccctgagctttctgggactatttagaccctggacttattcataatatacctactgcaggcctgacctcacttgtaggtgtccacacccctaccccctcactactgctagattgcacgtagcacttttgaaagtgtttccactattctggctgctggttttctgggcagcttttcattttactgaggttcctgcggtttaccctggacctccatgtttattgtcagtaaatttcacctgtgtaaaaaaaatgctgaatttggatgtggtaggtgcaaagggagtcacatagagtgccttgtgcagggctacaggacttgtaactgtatgccccctcccgctcagaggtctctgggaaggaggatgaagtaaggacaatgagaagtcccttaagactaagctaagagaacacacttcctagagaagctgctttgcttaatggaaggttttggctcagaagtggggtcatgcggggaccatttcagctttactcttggtactcaacttcctagttgtgtgtttcttcctaagaaatcattttgccgtgacaaaatgatcacttcaactgtgccagcacagctgggagccattaggggctcagcatccctccttgctcctaagccacccaaatgttgtgaatatgtgtgctgtgacctctcctccaaccccattcctaccactccagcacagctcaagctgaaatgtcccatctgcactctgcatctcagctttgagttacagaaaaatttctcgtcttacatccttaaccccaacaggaagatatccagtgtgtccaaaattaggggagaagtcaacaaacagtcattttgttgttttcaaatttgtcaccaaatagtctgtttggctgctaggtttgcattggcttattaccctttaccctttctaaatccttggctactttctagtcttttaatgcctcacttccttaaagaggcagaagatagggcttaataaaggatttatttcccgtatttcatatcacgatgcttacatatagtaagagattgattcatatttattgaatttaattgagcagactaacgcctattagtgatattcatcctggaaccaaaagctaagaggtaagtaaatttcccaaaagagtgaagagtgtttaggtaggttttaagcagaggcataaaacactgggatgaatgactgaaagaggtagtagcatctctgtccctgaggagttgcacaatatcatcctttatgtggtggccattgttgagcctaaaggcacagggatggatgactgaggtcttcagcttctttctctagccatatgtggttctgaaaaataaaaaactttaggcctaggtctcctgctgactagctagatgatcagagtagcaagttattgcccctctctgagcttgcttcctcatgtgaaaaataggctttactagatagtctccaaaattcattccagttttgacattctatgactgttaacttgtcatgttttaaatctattgttaaatagccatcacgtatgaaaaggggtaaagtataactggagaatgggccagtttataagaggaaatggaatgttgtgggggggggggtcccaaatttacattctctcatgaatttcacacagcttttaatatatatattatatgtacatacatgtatatacatagacacatataatatataataatcatatccatcttgggtcaagaagagaataattaccccattcctcaatttgaattgtttatatgtctttttgctcacttatgtgaccctttatgtcttcaatagaagttgacatgccaaaagtgttggctaagcctagatacctactgtgaaatgaaaattttatggaaattcaagacaccataatgtatctccaaccactaataactctacataaaattagcaaataatttgccttattaatctaaaagcacactttttcatatatcagtgttcactttattgtttttccatgttaggaaactatgatatgtattatctaggtcaaataaatcattattttttttttggaacgaagtttctctcttgttgcccaggctggagcgcaatggtgtgatctcggctcactgcaacctctgcctcccgggttcaagcgattctcctgcctcagcctcctgagtagctgagattacaggcgcctgccaccacgcctggctaatttttgtatatttagaagagatggggtttcaccatgttgaccaggctggtcttgaacttctgacctcaggtgatccacctgcctcggcctcccaaagtgctgggattacaggcgagagccaccacacctggccagaaattattttatactttgacatcttgctcaaaataaaatgaaaacacctgacctggggaggaaaaactgtgcttagtttcattttagaaaaggccaaaaaaatgagaagaaaaagaacatcagggtttgacttacccaacatacctgctctatgttcaacaagtgaaaacaaaggcagtttgcagcccataaaaaatattttttaagatagaaaattctcctaaaacaaaaagtagttgtgaactaccaggcatgcatctaaaaaaaaagacctgagaatccaaagctgacaacctatctagccatctccttttggcagagggatgcccagttaatctccagcttggacttgtctttgcccagaatgcctgcctatttctttccagagttattttggcttttaaagaatatatggaatgtttcattctgtagaccagacccttcgtcaaggagaattatggccattaaaaaaagaggtttgaggaccagaaaaatatagctgtctctaatactttttaaaaggatatatgtctagattccatttgagacaaggatttatttctgctgcgtaagcagaatgtcaaggtaccggccaatggcctcctcgtgaagctttctccatctagtcaagaatgcattggtatttcctgcctttgaactcttcaaatgctgatactctgagtcacccaattatgtcttcaactatgtagtgtcatgtatgccacaatgcctttgcccatgcctttctctctacctgttatgccaccgtacccctctcttgtccaactgcctaattctagtcaactccagtgttaacaacactatgaatcctattctgactgtgatcaggagaattatggggattcttcctttagacatgaattatgctttgaaaatgactctactgtgccctatcgctttgtgttataattgtatcatttaggtatcattttcctactcccagtgggaaaggcacagttaatatgttggggggaagatacacacatacattccaaacaaatactgcccccactctgcccagatcccctcaggaccttcactgggaagagtgtcggttgaagtgttcctgtgagtggtttattaccacttgctattaatgctgctgtcatctatattcatccacaaatgtagaaaaatctggttgctatggagaccactgttgcttttgctttatgttagaaaagggcttcctataaggtctcctaactggttttcctagagaaggagatgaattaatgttaaccttcattagaccttgtctctttaatacaatctcccttccaagcacaggtgcttcagaaaatctcatcctggcaaaataggatcagaatgtaatgtactaattcctagttattatttttttggaaagttcactgctgtggtgaaaactctcccaaaccccaatgatagctatgtctaagagccctcaccaccgcatggcacccaatctcatgacaccctctcctttcatttctcctgccacttccaaacatggggctagatgatcaactgttttttggttttccttataatcccctcagccttcccttcatcccatctatggaaatcctacttatttttcaaccctaaccttatctcctctatgaaggctgtcctgcctagttcagctcacagtgactcttgagaaactcttcccagactctcatataaccaattattgtattcataggacatctgtgatgacccccatctgattgtgggcaacattagcaaccaccagctgacccaagggagactggggcacaagccaatggtttctgcattttcctgtttggctgttcaggagtctcattggacaaaggtattatccctcctgtgggacctcattcagtttccactttcttgtcttctttaataactttaggaaaaaaatcagcgcataacttccttagattgttgtatttcttgaaagcagagatattaactaggcgacttccctccatttcattataagaagttttgcaaacacagaaaagttgaaataattttatagtgaacactcatatacccacctagattctaccattaacattttactctacttgctttgtcatatatgctcactgatctttggttatcatttgccgtgcattgactcagtatctctgcatattatgttatctgtacctattggggtataaagtcagtagaagccaggaagtcaataatacatattaataacaaaaaaggtgagaaatacagaagtaggacttgaaaagttctaataaattattaatagtacaaaaattcctttagcattcaggtagaggtcaaggcaatgaagtgttaacttgacttgggacaaagttaaaacattttcctcaaaaaataattttagaatattaatgtgtagctgttatacaaaaaaaattcctaaacatgattttattcaaaatgcaaatgaaatccatatttaatataattgatataaaatctctagaatggatatttaaaaagcaaactacaatgggccttgattttgattggttttgctctttagaatgccttgcattttaaacatgcaatcatgaatatgtttatatagtccgcttctcaacatctagtttatagattatttgtggaaagcatttaaccactaactggttgtcccagccacactgtgtactcctgtgtgcatttagacaggcatggtgatatcatcctcagcaaaactgaactgaggaagcagaagttgtgggcaaaatgccatatctaggaatttccaatccagactcaaaccaggtgtatgtggcatgcttcctgttgccctgtagatttgccaggagtaaactgtaatctcagtttctggatgtggtctggtgaataacacttgattaaatgttcttgcatttctagacaattcccaaccataaggaacaggaatgggaccctcaaaaaacagaaaaatacgctgggatatttcactttcgtttctggcattttggagaatggactgaagtggtgattgatgacttgttgcccaccattaacggagatctggtcttctctttctccacttccatgaatgagttttggaatgctctgctggaaaaagcttatgcaaagtaaggaggtgattgactagtctgctatcagggtacatgaggaaaggaaagccacatttatctttgggagctcattctctcccagcccaaccctggagtttaagttgggtaagatgtcagtcagaaccaaggcattgctttgcacttgggcctggctctcagaaatcttagatgagagagaaatcagaggttcttgtttccatttaaactcttacctgctcccaggtaccctttcctcctgctatctgcagatcacatggcactatcacttcattttttctttatctcatatctccccgtagaaagaagtttctgcatagactgtccttgatcaacatagcctaagcctagaaatttctgaatataatttcaaaacatctctcatttcatacctagagaaaagccatctggtaaagtctaggcaggggatgttctgattctttagattatgatgttcttgacctggaaaaacaattttacaaagataaccttgcatacttgccctcaggctgctaggctgttatgaggccctggatggtttgaccatcactgatattattgtggacttcacgggcacattggctgaaactgttgacatgcagaaaggaagatacactgagcttgttgaggagaagtacaagctattcggagaactgtacaaaacatttaccaaaggtggtctgatctgctgttccattgaggtttgtactcatgaaaaacaaccactgtatactcattcctggcagaagagactacaaagtttggtagggaaattcgcccttaacccgaagacccatgaaaaactattaatgggacttggaaagctaaaatacacattttgccctggtgtggaagctgaggtgctttagttttttatccttttgtaccagtcattccacatggaaccaatgcagcatccaggcttgtgtcagtagcctctgctaaattattcctcttgtctctgcttctagatcttgaggttatggctgcttgctcaataaatgaatctgccccatcaaattttatggcagttcatattaatgtcctacagtggatagtttgaatctgacttgtttgagttgttatattacattctttatttattttcctctactgtttttgtttcaagttgggtgtcaggatgaaatttccatctgtgtgagaactagcttcaatcctactgggttaagccaattaatgaagaagaggagtcaggattgggtctcccaattcctgtgcctttatatatctttctttgctctcagtctcccaatcaggaggagcaagaagttgaaactgattggggtctgctgaagggccatacctataccatgactgatattcgcaaaattcgtcttggagagagacttgtggaagtcttcagtgctgagaaggtgtatatggttcgcctgagaaaccccttgggaagacaggaatggagtggcccctggagtgaaatgtgagttgcattccactttcacagctacatctccaaagccctgtagttctcccagacccatccctccagactgctagtgtgctgtcaatgctcagtgacatctgtgggcttttgtcaggcacggggtctgtgacccagccgcagatgaaataaagcaggactgatcctcatgcactctgtttctctggcatcctacttactacaagaagtcaatggcaaacataatgatttatcttttttttttttttctatttactttcagttctgaagagtggcagcaactgactgcatcagatcgcaagaacctggggcttgttatgtctgatgatggagagttttggtgaggaggggtttctgcactaagggaattggggcttctacatggaactacagtgttaagtattaaataccatctttatttttttcctgtgctccttccattcaggatgagcttggaggacttttgccgcaactttcacaaactgaatgtctgccgcaatgtgaacaaccctatttttggccgaaaggagctggaatcggtgttgggatgctggactgtggatgatgatcccctgatgaaccgctcaggaggctgctataacaaccgtgataccttcctgcagaatccccaggtttgagtcaattactttatttgcctcaaagttatccagtcaataggaactcagatcttgctttggtcatctctggagtatttctttagcatcaaatcttccttttgcagctattgtgtaatattcaacaaccaggatccctacggattgtctcaggtgcttgtaaaacacagcagactatgtctttttgcagagacagactttggcagcagtatcaaatctgaatcacctcctctggctgcctctcttctggccatattgtctggtatggctctttgacaatccctgcttccttgtgatggtcccatattggagagagaagatctgctttgagatgctccctcaattcttcctcatttctctttactgcccagctgttctctggggtgcacatttactatattcttcctctttctaatgcagatgactcttttgaaccccattattatgcctccattttatcatctagatccaggtcatttttcccaggatttgaatcattgccctgtcaacgactctgtcccatccatctcccattacagtgctattccaggtgacataacagggtcaagtccacgcacactccagagtaaaaaatccaaacatctaaaggctgaatctataataacctggatggtttcatctcaaaatgtgctgatgagctaactcatagaaaacaagaattctgactatattgctgcctcactgcccatgggtgcgtcttttcttttcatggatctcattggtcaggcatttaggagaatatggagactagtgggctgattcacctaactcatactgctcttccacccttcccatcttaattgttcctaaagaaatatcctatctccccccacacacaccacctcacctccatttacaactctggaaatgtttcaagtattaggcacatatactaagctgggaaaatggcttcactctatatgtatgtacaggattgaacttaggggccttagttcagagtctgtttttaagtcctccctccctccctccctccctcccttcttttcttcctaccttccttccttccctccctccttccttccttccttccttccttccttctttccttcattttagagatggggtctcactttgttgcccaggctggagtgcagtggcatgatcacagttcactgcacccttgaattcctgggctcaagggatccttctgccttagcctcctgagtagctgttttatgtttccttctaaagggagagaggaatggagacagagacagagagaaaaatctgatgccttttagttttatctcctaatagcaccgtgattccccagatgatgtttggaaagtctctgacacaggcttgtagcttccttaaagtggaagtagcaaaacatcaattctccaaggagcccttccacaagctgtatgtctggctggcaaaaggaggctagcccagggtgatgctgtagtgtcaggttgagtcaaataaatacctttctgtctttatggattccaaactttttctatatatggcatttaaatacaaagggataataataacaataataataataataatacaataatttaccaagaacttattagaacaaagcatatcctctttggcatcaaaggctaagaataaggttgtccttcaacacatgctgaatgacatagaaagaaacaagtgttaatggtctacgcttagcaagtcagtgaattatccaagaccttgttgtctgataaatatgaaagcccagaaaataactcaaggctctgcttcccaatgacaagctttattccctgaaatttaagctcgttcatatgaaatgggaatgctaactcacctctgtggtggtctctttcccttagtacatcttcactgtgcctgaggatgggcacaaggtcattatgtcactgcagcagaaggacctgcgcacttaccgccgaatgggaagacctgacaattacatcattggctttgagctcttcaaggtaaaaatgggcatttggggcagagagaatgaaggcaaacagagtaaaaattaggataatttaatggtaggggaagaatggaaggcctagggataaaaaagacagagcatacaaaaaccatgatttgagtggaattgaatattttaccctatttcatttccaggtggagatgaaccgcaaattccgcctccaccacctctacatccaggagcgtgctgggacttccacctatattgacacccgcacagtgtttctgagcaagtacctgaagaagggcaactatgtgcttgtcccaaccatgttccagcatggtcgcaccagcgagtttctcctgagaatcttctctgaagtgcctgtccagctcaggttcagtttccttcgcaagccctcaaacccctgttctttgctttacttccaatcctaaaccccttcacccgtctcccctcttcagacattcaatgggacaacttgtttaaatcagacttgattcactgaaatcatggtggtaaaaatatttctcaaagggtggttgggggaaattccccagtgaaggtctgaacttcagagctctgagctacccttaaagaggaacaggcctatagtctaagttcttccacatcaaatttgtcttctgttttctggctgatggcctcttttcttaagtaggtagcactcctccctgctcttctattatgttctgtgtgctggatcaccaaagccacctttttgtcccagccctgcctactttgatctttatctcctggcccttaaagaaaggagaaaggaaagcatgcttaaaatatatataagacatatctgaggaggaatgggctaagtcacacaatgtctcatgcttttcagcaatgatgtctgctttggcgggcttatttcatcaaaggatatttatcatatgatgacaatattttatttttgatgttctagggaactgactctggacatgcccaaaatgtcctgctggaacctggctcgtggctacccgaaagtagttactcagatcactgttcacagtgctgaggacctggagaagaagtatgccaatgaaagtaagaatggcaggaatgtctgggaaagcaaaattcagttgcatttatagcacataagttagaaaacatgatcacaaatgattttctccagcgatattttgtctagagaagttgggaatggatggcaaccatggcagaggatgggatgtcaacttcaagcaaggcctacattagattcattttcatattcctatataaaatatggaaaaggaaagggaagtgggaataaaagtgttgaatctcagtcattctggtgctcgagtgctatgctgaaagtcccagaattggcttagcgagataccttcttgtctatctagaaaaggaactttaattgctgtgttaaaaacatatgtcactttgttccagctgtaaacccatatttggtcatcaaatgtggaaaggaggaagtccgttctcctgtccagaagaatacagttcatgccatttttgacacccaggccattttctacagaaggaccactgacattcctattatagtacaggtaagagtgtgtacaggggtcgccagaaaggctcatactttgtaccagatactagatgatcccaagtaccttatatatgtttaggatgcagagcaagaattatcgtattttttggtttgttttatactcaaaaactcttctcatcaagcatggacactgacttccttattaccatccatcctaaatctcctctcttccatttatttaattgtgggcaaaagcccacatgctcaccagtacacatgttaacacacgtatcataaaatcccatggaggaaagcttatgccagttcagaggaccctcacatggctaggtcaggatgaatcactgcagtttggcagtttttctgacttaatactcctgaccagcagcctttaggtaaccatcccacaggtcaagaacgacccggagattctgttttctggcttttcatgtatattctttgaggtatcctcccctcaactgatgggctatcaggaaaggacagaatagtctcttggttttaaaacaaatcttttgaagctcagcattagatctggatgtcactgggcaaaggctaatctcactgagggctgctcatcttcactcccttcgtttgtctttccaggtctggaacagccgaaaattctgtgatcagttcttggggcaggttactctggatgctgaccccagcgactgccgtgatctgaagtctctgtacctgcgtaagaagggtggtccaactgccaaagtcaagcaaggccacatcagcttcaaggttatttccagcgatgatctcactgagctctaaatctgcaatcccagagaatcctgacaaagcgtgccacccttttattttccgtcaggtgccaggtcttagttaagattcacaatctttagaaagaatgagattcacaataattaactcttcctctcttctgataaattccccatacctcccaatccaagtagcatctgtagctacataacctatatacctccagcagctggacatggggaggcgacagtcctatctagacatcatacacatttgccaagaaaggatctctggggcttccgggggtgagattcaagcaggacaataacaagaggctggacaccctacagatgtctttgatgttttcagttgtttgatatatctcccctgtagggcatgttgaggaaggaggagggctgatcaaggccaagctggtctagcctgacatcctagctcctgactgaacactatagacttcccagcagcatttcacccagcagccagagccggctttaagtccccaacccttacagacaccactgccaccaccaccaaccacgaccaccaccaccaccaccactcaccaccatcatcacctccggaaagtgtagtcctgccctaacccaagtcacccccgacagtaaattttaccttcatgttgagaaagcttcctggtgcttaatcaagagctggagttcaatgagtcctagacagtgagaggggcctgagcttcagctcaatggaagcctgctgtgtgccacaagacggaaaagtggaagaagctgcagtgggagacaaagcctcggtcccccacccatccacacacacctacactcacacacgcgcacatgggcgcgcacgaactaccattcaggcagtcagtgggcaagaggaaagataagtaagtaccatacacacctaaaagatgagagaattcatccagacatattacagccagtttggggcccctgactgcaatgtgaaacctctcgctgctgctaggtttacaaacaagcccattgtcctgtgcctcctaatatcatttgtactgaagaccccatctggggacttgagactttggtcccagcccagactcctcagacttttctctcagttgggatgcttcactcgctgggggtgtttgtttgccctctcatttttcagtacttctacagaattttctctagagtcagtcattatgaaatgtacttccctccatcttaacctatcaactttctgcccctccttcaaggcccagtataaatgccacctcctccatgaagccttccctaattccaccccaaacccccaccttcaacaatatttcaacgcttctgcaatgatgaaaaagaaacatagttgtagtacttagcctacctagaccagcaagcattcatttttagctcgctcattttttaccatgttttccagtctgtttaacttctgcagtgccttcactacactgccttacataaaccaaatcacaataaagttcatattcagtacattg

SEQ ID NO: 16 - DNA, 211 bp, Artificial Sequence
  Description of Artificial Sequence: Synthetic polynucleotide
acctaccattcggtaaccatgtgaaaggatggaccaatatcaaggtgtcagttgacctcagtgaattctgtgatgtttctgagatgcagactcccgtgtagtttcagattcttggtccatggatgacaccacctgcccatgcttccttgaattaggctttcctaacctgaagcgccttcaaacttccaataaagagatcattttctgcttc

SEQ ID NO: 17 - DNA, 636 bp, Homo sapiens
ggcagtggcagtggctatggcggtggcctcggtggaggtcttggcggcggcctcggtggaggtcttgccggaggtggcagtggaagctactactccagcagcagtgggggtgtcggcctaagtggtgggctcagtgtggggggctctggcttcagtgcaagcagtggccgagggctgggggtgggctttggcagtggcgggggtagcagctccagcgtcaaatttgtctccaccacctcctcctcccggaagagcttcaagagctaagaacctgctgcaagtcactgccttccaagtgcagcaacccagcccatggagattgcctcttctaggcagttgctcaagccatgttttatccttttctggagagtagtctagaccaagccaattgcagaaccacattctttggttcccaggagagccccattcccagcccctggtctcccgtgccgcagttctatattttgcttcaaatcagccttcaggtttcccacagcatggcccctgctgacacgagaacccaaagttttcccaaatctaaatcatcaaaacagaatccccaccccaatcccaaattttgttttggttctaactacctccagaatgtgttcaataaaatgcttttataatacaaaa

SEQ ID NO: 18 - DNA, 626 bp, Homo sapiens
cccagcccagacagggagctgggctcttttctgtctctcccagccccactccaagcccatacccccagcccctccatattgcaacagtcctcactcccacaccaggtccccgctccctcccacttacgccagaactttctccccattgcccagccagctccctgctcccagctgctttactaaaggggaagttcctgggcatctccgtgtttctctttgtggggctcaaaacctccaaggacctctctcaatgccattggttccttggaccgtatcactggtccacctcctgagcccctcaatcctatcacagtctactgacttttcccattcagctgtgagtgcccaaccctatcccagagaccttgatgcttggcctcccaatcttgccctaggatacccagatgccaaccagacacctccttcttcctagccaggctatctggcctgagacaacaaatgggtccctcagtctggcaatgggactctgagaactcctcattccctgactcttagccccagactcttcattcagtggcccacattttccttaggaaaaacatgagcatccccagccacaactgccagctctctgattccccaaatctgcatccttttcaaaacct

SEQ ID NO: 19 - DNA, 183 bp, Homo sapiens
tgggcaacatgatgaaaccctgtctgtactaaaaatacaaaaagttagctgggcatggtggtacacacctgtaatccctgttactcgggggctgaggcacaagaatcacttgaactctggagagagaggttgcagtgagccgacatcagccactgcactcaagactctcgatctctctctctc

SEQ ID NO: 20 - DNA, 86 bp, Homo sapiens
gctgggagtgaccagaagaaatgacgcagaagtgaaatgaactttttataagcattcttttaataaaggaaaattgcttttgaagt

SEQ ID NO: 21 - DNA, 576 bp, Homo sapiens
ccctgaggaaggttcattgccattgtcatcaccatggaaacaacgttcctctccacctgcattatgtactacatgacaggcatcaatctggggaaataataaaattatcacctttgtcagaccataagagtttctccaaaagtggtcagtttggctgggcaatattttctctcatctaacaaacacaatccattgtcatgaaattacccttaggatgagtcttctttaatcaatcatatattgggcggaaaaaacaccagctttgacccgaagtagttgaagagctacttcattcttttctgaagttgtgtgttgctgctagaaatagtcatttgtgaattatccaaattgtttaaattcacaattgaattagttttttcttcctttttgcttgaagcaaacagttgacaatttttaaccttttcattttatgtttttgtactctgcagactgaaaagacaaagtttatcttggccttactgtataaaggtgtgctgtgtccaccgttgtgtacagaatttttcttcattaattttgtgtttaagttaataaaatttatttgtgatgtactgtcaa

SEQ ID NO: 22 - DNA, 242 bp, Homo sapiens
ccttgcatttgtgggttttcttaagcaaaatacttgcattaggtttcagctggggctgtgcatcaggcggtttgagaaatattcaattttcagcagaagccagaatttgaattccctcatcttttaggaatcatttaccaggtttggagaggattcagacagctcaggtgctttcactaatgtctttgaacttctgtccctctttgtgttcatggatagtccaataaataatgttatctttg

SEQ ID NO: 23 - DNA, 520 bp, Homo sapiens
ttttacaaagttgtcccccgggactgagctgttgagttagagccaacatgagtgagcgacaaggtgctggggcaaccaatggaaaagacaagacatctggtgaaaatgatggacagaagaaagttcaagaagaatttgacattgacatggatgcaccagagacagaacgtgcagcggtggccattcagtctcagttcagaaaattccagaagaagaaggctgggtctcagtcctagtgggagaaccccctcctagtccacctgaaaacaccaaattcaaccatcatctgtcaagaaattaaaagaacaacaccctagagagaagtcatccacacacaatccacacacgcatagcaaacctccaatgcatgtacagaaacctgtgatatttatacccttgtaggaaggtatagacaatggaattgtgagtagcttaatctctatgtttctctccattttcattcctcctgcaactattttccttgatgttgtaataaaatgaagttacgatgagtgaattc

SEQ ID NO: 24 - DNA, 552 bp, Homo sapiens
tacgagctgctgacccagcactggcacctgaaaacacccaacctggtcatttctgtgaccgggggcgccaagaacttcgccctgaagccgcgcatgcgcaagatcttcagccggctcatctacatcgcgcagtccaaaggtgcttggattctcacgggaggcacccattatggcctgatgaagtacatcggggaggtggtgagagataacaccatcagcaggagttcagaggagaatattgtggccattggcatagcagcttggggcatggtctccaaccgggacaccctcatcaggaattgcgatgctgaggtaccggtgggacaggaggaggtctgctaggtcacatggaagaaagaccatggcatgggcctgtggcctgaaccctggggctctgtgatggagccagccagatcatggggaagtctgcctttcaaggagtgcctttgggaccttaaaggaattgaaaacaaggatgacgtacctaattaactgctgggaaagagttaacaatgaatgttttgttcattaaaatgtgttctcagcaatctc

SEQ ID NO: 25 - DNA, 747 bp, Homo sapiens
tttttgtacaatgtaaagatcatctgagcaagatgagcattttgtaaaaatgaaaatgtgactcacataaaatcaggaacttgacacagtgttgcattaataactttagggtgcagacatgctgtgtgaatctcacaatgcgtcgtagatgtcgcgtgttggaagggagcaggaggaaggactgatactggcaaatcagtagagtgaggtgatccttagcaacgtgccaggacacttcctgtgtgcctgcagttgtcagggaccatttgggatcccgaatctcattctctaaaactgctttcttgaaacatgttacttccttagtataatcaatgtatactcccttactggcctgaaacgttgtatagctacttattcagatactgaagaccaacggactgaaaaaaagaacaaacattagctattttatgctgcaagaaccaggacacacaattcgccaatcatcccaccatataaccttcgattgtgcttctcaactccaccccataatttctcccagagaccatctatcaccttttccccaaagaagaaacaaaaccagttgcaccttaaaccatggatattttttcctcaggggctttaaatagtttcctatgcaacgtgtcttgtagcacaaataaaattctacaaaagttgcagtaaattttatttggatattttaacctgttaagtgtgtgtgtgttttctgtacccaaccagactttaaataaaacaaacatgaaacct

SEQ ID NO: 26 - DNA, 641 bp, Homo sapiens
tccaaagccccactgagatgtgggaaaacatggagaagcacacggagcattcacaacttattgccgtcagagtcaatacatggatcctccctctgtggtggtcaccagccaccaggccccaggagaaaagaagaaactgaagtgcctggcctacgacttctacccagggaaaattgatgtgcactggactcgggccggcgaggtgcaggagcctgagttacggggagatgttcttcacaatggaaatggcacttaccagtcctgggtggtggtggcagtgcccccgcaggacacagccccctactcctgccacgtgcagcacagcagcctggcccagcccctcgtggtgccctgggaggccagctaggaagcaagggttggaggcaatgtgggatttcagacccagtagctgcccttcctgcctgatgtgggagctgaaccacagaaatcacagtcaatggatccacaaggcctgaggagcagtgtggggggacagacaggaggtggatttggagaccgaagactgggatgcctgtcttgagtagacttggacccaaaaaatcatctcaccttgagcccacccccaccccattgtttaatctgtagaagctaataaataatcatccctccttgcctagcaa

SEQ ID NO: 27 - DNA, 687 bp, Homo sapiens
tacgtgcagcgggccaaggcttacctggaggaggagtgccctgcgactctgcggaaatacctgaaatacagcaaaaatatcctggaccggcaagatcctccctctgtggtggtcaccagccaccaggccccaggagaaaagaagaaactgaagtgcctggcctacgacttctacccagggaaaattgatgtgcactggactcgggccggcgaggtgcaggagcctgagttacggggagatgttcttcacaatggaaatggcacttaccagtcctgggtggtggtggcagtgcccccgcaggacacagccccctactcctgccacgtgcagcacagcagcctggcccagcccctcgtggtgccctgggaggccagctaggaagcaagggttggaggcaatgtgggatttcagacccagtagctgcccttcctgcctgatgtgggagctgaaccacagaaatcacagtcaatggatccacaaggcctgaggagcagtgtggggggacagacaggaggtggatttggagaccgaagactgggatgcctgtcttgagtagacttggacccaaaaaatcatctcaccttgagcccacccccaccccattgtttaatctgtagaagctaataaataatcatccctccttgcctagcataacagagaatcctttttttaacggtgatgcgctgt

SEQ ID NO: 28 - DNA, 632 bp, Artificial Sequence
  Description of Artificial Sequence: Synthetic polynucleotide
tctttggctaccaagatagctccagcttctacgtggtcatgtggaagcagacggagcagacatattggcaagccaccccattccgagcagttgcagaacctggcattcagctcaaggctgtgaagtctaagacaggtccaggggagcatctccggaactccctgtggcacacgggggacaccagtgaccaggtcaggctgctgtggaaggactccaggaatgtgggctggaaggacaaggtgtcctaccgctggttcctacagcacaggccccaggtgggctacatcagggtacgattttatgaaggctctgagttggtggctgactctggcgtcaccatagacaccacaatgcgtggaggccgacttggcgttttttgcttctctcaagaaaacatcatctggtccaacctcaagtatcgctgcaatgacaccatccctgaggacttccaagagtttcaaacccagaatttcgaccgcttcgataattaaaccaaggaagcaatctgtaactgcttttcggaacactaaaaccatatatattttaacttcaattttctttagcttttaccaacccaaatatatcaaaacgttttatgtgaatgtggcaataaaggagaagagatcattttt

SEQ ID NO: 29 - DNA, 502 bp, Homo sapiens
aaatctgtttttccatcaccactgccgccccgtgagccatcctcgtcgcttgcctgcctgagtcttaggcacaacctcctcaccttccttcccctcgagccccttctgatctgtgcttctgccagagcgattctttggaaaagggaatctgatgtgtcattcctctgcttaaaacagccttgtggcttcccatcacttcagtgtaaagattttaaaaataggccggggatggtggcttatgcctgtaatcccagcactttgggaggccgaggcagacggatcacctaaggacaagagttcaagaccagcctggtcaacatggtgaaaccctgtctttactaaaaatacaaaaattagctgggcatggtggcatgcgcctatagtcccagctactcgggaggctgaggcaggagaatcacttgaacctgggaggtagaggttgcagtgagccgagatagtgccactgcactccagcctcggcatcagagtgagattctgtttg

SEQ ID NO: 30 - DNA, 659 bp, Homo sapiens
aataaataaataaatttatggatggtgaagggaatggtatagaattggagagattatcttactgaacacctgtagtcccagctttctctggaagtggtggtatttgagcaggatgtgcacaaggcaattgaaatgcccataattagtttctcagctttgaatacactataaactcagtggctgaaggaggaaattttagaaggaagctactaaaagatctaatttgaaaaactacaaaagcattaactaaaaaagtttattttccttttgtctgggcagtagtgaaaataactactcacaacattcactatgtttgcaaggaattaacacaaataaaagatgcctttttacttaaacaccaagacagaaaacttgcccaatactgagaagcaacttgcattagagagggaactgttaaatgttttcaacccagttcatctggtggatgtttttgcaggttactctgagaattttgcttatgaaaaatcattatttttagtgtagttcacaataatgtattgaacatacttttaatcaaaggtgctatgtccttgtgtatggtactaaatgtgtcctgtgtacttttgcacaactgagaatcctgcagcttggtttaatgagtgtgttcatgaaataaataatggaggaattgtcatgtg

SEQ ID NO: 31 - DNA, 624 bp, Homo sapiens
cccccccgccgcttcacaggctgagtccaggccctgtgtgctttgtagagccagctgcttgctcacagccacatttccatttgcatcattactgccttcacctgcatagtcactcttttgatgctggggaaccaaaatggtgatgatatatagactttatgtatagccacagttcatccccaaccctagtcttcgaaatgttaatatttgataaatctagaaaatgcattcatacaattacagaattcaaatattgcaaaaggatgtgtgtctttctccccgagctcccctgttccccttcattgaaaaccaccacggtgccatctcttgtgtatgcagggctatgcacctgcaggcacgtgtgtatgcactccccgcttgtgtttacacaagctgtggggtgttacgcatgcctgcttttttcacttaataatacagcttggagagatttttgtatcacattataaatcccactcgctctttttgatggccacataataactactgcataatatggatacgccttatttgatttaactagttccctaatgatggacttttaagttgtttcctttttttttcttttttgctactgcaaacgatgctataataaatgtccttatc

SEQ ID NO: 32 - DNA, 562 bp, Homo sapiens
ccattgcatgagaaaagtttgcaggatgtaaagacatgtatacaaggatgtttactgaagcattgtttgtaatggcaaagaagtatgaacaatttgaacccaacaggaggagaatgactgactagcattgcattgactctatggaacaccacagttactaaaacgaaaacgttagtgctgtattgattcactcaaagcaatgtccatatgtcaaaggcaaattaaaaagtgatgacagtttgtgtgttaatatgggcaaggacactgattaccccaaagggtaggaatggaggagaggagggcaaaggaggtgagaggttattaacttcttaaaatcatattggatttttccacttgtataatcagcatatattatctttttgattaaaaaccaagaaagaaaaaattaatttttttctagagaaattttcctgcatctcaccttaaaaaggtttttttcaaaattgcatcgattttcaatactgaaagaaacgtggtatactatggaatcagactaggtgaatgtatttccaagtaaattgcagcatatttcattctttcc

SEQ ID NO: 33 - DNA, 472 bp, Homo sapiens
cacactgaccctccccactgtttatttattgcacggatctaagttattctccccagccagagcccgagctcctgctccctgggaaaagtggcgtatggccctgagctgggctttatattttatatctgcaaataaatcacattttatcttatatttagggaaagccggagagcaacaacaaaaaatgtttaagccgggcgcggtggctcacatctgtaatcccagcactttgggagtccaaggagggggatcgcttgagtccaggagtttgagaccagcctggacaacatggtgaaaccccgtctttacaaaaaatacaaaaattagccatgcatggtggctcatgcctgtagtcccagctacttgggaggctgaggcaggaggatcacttaagcccagaaggcagaggttgtagtgagctgagatcgcaccactgcactccagcctgggcaacatagcaaaatcctgtctc

SEQ ID NO: 34 - DNA, 598 bp, Homo sapiens
tgccccatgcaaaaaatccagagaggtagtgaggtgtcagagctaaacacttggtgctgggttttgttgatgctggtataatgtgacacagtacaattacatgctaaattttgcattttctctatataacatctatttttcctgatactgtgcctttgccattttgataatgctattttgattgagtgaattttatttcctttgtattcccatagtgaacaatatattaaggtagatgccctttatctgggtactcctggtagattagctgttacacctcccttcccttttttacagtgaacctgtattcagttattgtcactctgagaactctccaataacaatttcttttccacagttaacaacacagctgttacacctcccttcctttttttcacagtgaacctgtattcagctattctcactctgagaactctccaataacaatttcttttccacagttaacaacaaagttctgtttttaaatgaagagattaagttctttttaaatgcctaaaggcatattctgacaacttttctacttctttaacttttttgatttaagatatatgcaaagcaaataaattcaataaagcct

SEQ ID NO: 35 - DNA, 710 bp, Homo sapiens
agcaagctcaataacaaagtggttcaacgaggacttggaattgcatggagctggagctgaagtttagcccaattgtttactagttgagtgaatgtggatgattggatgatcatttctcatctctgagcctcaggttccccatccataaaatgggatacacagtatgatctataaagtgggatatagtatgatctacttcactgggttatttgaaggatgaattgagataatttatttcaggtgcctagaacaatgcccagattagtacatttggtggaactgagaaatggcataacaccaaatttaatatatgtcagatgttactatgattatcattcaatctcatagttttgtcatggcccaatttatcctcacttgtgcctcaacaaattgaactgttaacaaaggaatctctggtcctgggtaatggctgagcaccactgagcatttccattccagttggcttcttgggtttgctagctgcatcactagtcatcttaaataaatgaagttttaacatttctccagtgatttttttatttcacctttgaagatactatgttatgtgattaaataaagaacttgagaagaacaggtttcattaaacataaaatcaatgtagacgcaaattttttggatgggcaatacttatgttcacaggaaatgctttaaaatatgcagaagataattaaatggcaatggacaaagtg

SEQ ID NO: 36 - DNA, 710 bp, Homo sapiens; identical to SEQ ID NO: 35

SEQ ID NO: 37 - DNA, 1627 bp, Homo sapiens
cagacataagcccaaggggcccctgcacccaagggaccctgtccctcggtggcctccccaggcccctggacacgacagttctcctcaggcaggtgggctttgtggtcctcgccgcccctggccacatcgccctctcctcttacacctggtgaccttcgaatgtttcagagcgcagggccgttctccctcgtgtcctctggacccacccgccccttcctgccctgtttgcgcagggacatcacccacatgccccagctctcggaccctgcagctctgtgtcccaggccacagcaaaggtctgttgaacccctccctccattcccagttatctgggtcctctggattcttctgtttcttgaatcaggctctgctttccccctagccactacaggcagcctctgacagtgccgctttacttgcattctgcagcaattacatgtgtccttttgatccttgcccaacttccctccctctcccagctcctggcccctggcccagggcccctcttgctgtttttacctctgttccttggggcctagtacccagcaagcacccaaatgggggaggttttgggatgagaggaggaaacgtgtatacctgtaacatctggtggctcttcccccagaagtttgtgttcatacataattgttttccacgctggatcataatgtgacgtgcagttctgccctgtgctggggagccacatgaagcttcccctggctaacttgctaccccgcagcaatcccagtgtggccgtctgcttgctaaaaaatggatctgtgctcatctgtattgatgtccttggagttctacaagtggaacttaagtgtcaaaaagaatatgtggtttttagctgagcgtggtggctcacacctgtaatcccaggactttgggaggctgaggcaggaggattacaaggtcaggagttcgggactagcctgtccaacatggtgaaaccctgtctttactaaaaatgcaaaaattattctgggtgtggtggcgggcatctgtaatcccagctatttgggaggctgaggcaggagaatcgtttgaacccgggaggcggaggttgtagtgagctgagatctcaacactgcactacagcctgggcgacagagcaagactccgtctcgggaacacacacacacaaaaagaatatgtggttttaatgtgctttgatgagtactgccaaacttactccacagaaaaggcctctttctgaacatcctcgcctgcgttctatttcacccaccgtgatgcctggcctgagggcggcgtgcttgcttgtagcatttcttgaggatttgctacttgttcacctgcctcttaggagcactgtgccctgcctccatggaagggctcttccggcagggatgcaggctcacagcgccctggggctggacaccaccggccggagcatggcggacagcacacacggcccggggcgggaaccttggaaactttacacagatggggagctcagccattccacgtgtgctttcgctcagcacaatgcttactacaaacccacgtgtacttccttccagctggttgctttttattgttgctgtcttaaactccaaagttttaaggtgaatttattgaaacgtacgaaaatgctcagttc

SEQ ID NO: 38 - DNA, 455 bp, Homo sapiens
cagacataagcccaaggggcccctgcacccaagggaccctgtccctcggtggcctccccaggcccctggacacgacagttctcctcaggcaggtgggctttgtggtcctcgccgcccctggccacatcgccctctcctcttacacctggtgaccttcgaatgtttcagagcgcagggccgttctccctcgtgtcctctggacccacccgccccttcctgccctgtttgcgcagggacatcacccacatgccccagctctcggaccctgcagctctgtgtcccaggccacagcaaaggtctgttgaacccctccctccattcccagttatctgggtcctctggattcttctgtttcttgaatcaggctctgctttccccctagccactacaggcagcctctgacagtgccgctttacttgcattctgcagcaattacatgtgtccttttgatcctt

SEQ ID NO: 39 - DNA, 538 bp, Homo sapiens
tgccttggaagctggcgcttcagtttataacacaaattgacactttaggaagacaagagagctttgtattctccctgcaatcatttactcagtcaggaaaatactaaacactgtctttgcgtagaatataatgctactgatgtgaggaaaagaaatccagtgcctggcacatagaaaaggatagatacacttttgtgggaggaaaaatagtggtaaaaacatggactggagtctcagctctaccatttactaattatgtgactttggtcaaatatttgacccctctgagacttggatttcacatctggaaatgtgaagaataaacactacttaatagaattattgtgcaaattaaattaagtgtaaaaagcttggttcacagtaggtggcaaataaatatgtacttcctttaaggaaatgtgtcattttctttaacatagtttatattcataaggagacaacacacaaacacatacacaatcaatcaacaaaaatgtgatacagtagattattaagcaccttgctttgattaaaaagg

SEQ ID NO: 40 - DNA, 538 bp, Homo sapiens; identical to SEQ ID NO: 39

SEQ ID NO: 41 - DNA, 578 bp, Homo sapiens
tgcagttgaagctcagtcccatggcacaagtaactggatgctacaacaagcagatgaccctggaggacccctccccagtctagccttgagatgacaccccagcctgggccaagactttgatggcagctctgtgagaggccctgaagaagagagtctcttctttaccagttaagccacatctggattcctaacctacagaaactgtgtgataatagaagtctgttgtttggggcgatttgttacacagcattaggtagctaatacatagtcttgcaagagttcgttttttggctgagcattatgtttttgaggttcatctgtgttgatacctgtagttgtagttcatctgttttcattactatgtgcctttcccctgtaagtagtcccccccttatttgcaggggatacagggcccccagaaggtgcctgaaacttcagatagtaccaaaccctgtatgtactatttattttttcctatgtatacatgcctatgagaaagtttagtttgtaaattaggcacactgagagatgaacaataatgaataataaaatagaacaattatagcactatattgtaa

SEQ ID NO: 42 - DNA, 578 bp, Homo sapiens; identical to SEQ ID NO: 41

SEQ ID NO: 43 - DNA, 647 bp, Homo sapiens
ggcttatctgcattcaaaaaatttcagtaaagcagatgttgcacagatggtcagaaaagcaccatttttgctgaacttttcagtggaaagactggataacagattgggattttttcagaaagaacttgaacttagtgtgaagaagactagagatctggtagttcgtctcccaaggctgctaactggaagtctggaacccgtgaaagaaaatatgaaggtttatcgtcttgaacttggttttaaacataacgaaattcaacatatgatcaccagaatcccaaagatgttaactgcaaataaaatgaaacttaccgagacgtttgattttgtgcacaatgtgatgagcattccccaccacatcattgtcaagttcccacaggtatttaatacaaggctgtttaaggtcaaagaaagacacttgtttcttacctatttaggaagagcacagtatgatccagcaaaacctaactacatctctttggacaaactagtatctattcctgatgaaatattttgtgaagagattgccaaagcatcagtacaggactttgaaaaattcttaaaaacgctttagatttttatgtatgttaaaatgcagtattgtaaagtgaatatatatatgaataaatgaatatatttttaaatgc

SEQ ID NO: 44 - DNA, 554 bp, Artificial Sequence
  Description of Artificial Sequence: Synthetic polynucleotide
ggggctgatttagtcctccagatctcaaggagagccctcaggaaatcgccaggaaagtagaaggtcagctggggtgcaagccggaagtcaccatcgagtgcacgggggcagaggcctccatccaggcgggcatctacgccactcgctctggtgggaccctcgtgctgtggggctgggctctgagatgaccaccgtacccctactgcatgcagccatccgggaggtggatatcaagggcgtgtttcgatactgcaacacgtggccagtggcgatttcgatgcttgcgtccaagtctgtgaatgtaaaacccctcgtcacccataggtttcctctggagaaagctctggaggcctttgaaacatttaaaaagggattggggttgaaaatcatgctcaagtgtgaccccagtgaccagaatccctgatgttaatgggctctgccctcatcccccagtcttgggatctcagggcacaatggctggacatgggtgggctttgatgcagaactttctcttttgaatgttaagaataactaatacaattcattgtgaacag

SEQ ID NO: 45 - DNA, 613 bp, Homo sapiens
gacatagaactccacgacgtgtctcctattactcggcaccccctgcaagctctcttcatctgggccattcttcagaataagaaggaactctccaaagtcatttgggagcagaccaggggctgcactctggcagccctgggagccagcaagcttctgaagactctggccaaagtgaagaacgacatcaatgctgctggggagtccgaggagctggctaatgagtacgagacccgggctgttgagctgttcactgagtgttacagcagcgatgaagacttggcagaacagctgctggtctattcctgtgaagcttggggtggaagcaactgtctggagctggcggtggaggccacagaccagcatttcatcgcccagcctggggtccagaattttctttttaagcaatggtatggagagatttcccgagacaccaagaactggaagattatcctgtgtctgtttattatacccttggtgggctgtggctttgtatcatttaggtacaaaccaaggcacataatcgtgtgtgagtgtgtgtgccagtgtgtgtacatgcatccacatatgtgtgctctcatgtaaatgattaaaaagcctggaacttatgatgttt

SEQ ID NO: 46 - DNA, 613 bp, Homo sapiens; identical to SEQ ID NO: 45

SEQ ID NO: 47 - DNA, 724 bp, Homo sapiens
gcaaaaaatacctggtaattttcatttgtttttcatatactggtaccttcttttgggctgagatctttcttttacttgtgatatattcatattactcgtttataaaaaatcaaaaacaaaaggaaagaaaacaaaaaaaacttgcacaaaaatactgaggagccaattaatttcctacttcaatgtatctaatgtaagtgaaaatctggatttatttctctagtttacttattttctactttaataataactcaatgccaaaatatttctatgcttgtttcttggcataatacattttaaatcaaacctgttcgtaataaatcatgtgccacatcttgtcttacacataaaagccactgcttttaacatcccattgtacatttaacacataaatggtgttaacatcccattgtacatttaacacataaatggccattgtctttgtctcagtaaagtgtaggtggacaatcttcctgtgatatgtagtgacattggtcatgtagctagataattatggtaattgtgacaattaaagagaaataaattattgattatccttcagaaaaattatcaaggagtgttttattttccttgtccacagtggttgacagttataaagtagttatatgtgtatactatttagaagacgcctaattgtggattataaaatgtgcacattttctatcacttgtttccaataaagttgtattgaaacattccctat

SEQ ID NO: 48 - DNA, 724 bp, Homo sapiens; identical to SEQ ID NO: 47

SEQ ID NO: 49 - DNA, 724 bp, Homo sapiens; identical to SEQ ID NO: 47

SEQ ID NO: 50 - DNA, 621 bp, Homo sapiens
tcctggggctgaaggactgcagatgacagacaggaaaacacccaccagccccctttcccgcttgtgccagcagctgctttcctggtcaccaggcctggcccccaagtgccctgggccgtggctccctggggcaccggttggagaggggctgccaagcaggggctcagactaccacactcctgcagaccctgagccagcagagagggactgaggcggacagtggtcacggacctcccaggcacacagggcactcccgaccacccctgcccactgtccaacacctcccagcccctgaacttggccccagccctgctgggcccagaaccctgcagatgaagccacagagcaggcgctcgaccagacccatcaggggcgaggagggcacggaaacctgtgccgagatgggggcaagaggcccaggcagccaccagcacagagaagaggagatccccagagtcagggagggcagagggtggcagcgagggcagggcagccgcccccgctcccagccaggcagaaggcccccaccagcaccacacccatccccagcagcctgtccttgggagagggcgtcacccggtcagagactccaaataaaccggttcttgtcaaggcacagag

SEQ ID NO: 51 - DNA, 631 bp, Homo sapiens
ggaaagtcaccctacagggtttgtagggacatgatcagcatcctgatttgaaccctgaaatgttgtgtagacaccctcttgggtccaatgaggtagttggttgaagtagcaagatgttggcttttctggattttttttgccatgggttcttcactgaccttggactttggcatgattcttagtcatacttgaacttgtctcattccacctcttctcagagcaactcttcctttgggaaaagagttcttcagatcatagaccaaaaaagtcataccttcgaggtggtagcagtagattccaggaggagaagggtacttgctaggtatcctgggtcagtggcggtgcaaactggtttcctcagctgcctgtccttctgtgtgcttatgtctcttgtgacaattgttttcctccctgcccctggaggttgttttcaagctgtggacttttgggatttgcagattttgcaacgtggtactactttttttttctttttgtctgttagttatttctccaggggaaaaggcaataattttttaagacccgtgtgaatgtgaagaaaagcagtatgttactggttgttgttgttgttcttgttttttatagtgtaaaataaaaatagtaaaaggagcaa

SEQ ID NO: 52 - DNA, 552 bp, Homo sapiens
ttgaggtgactctgtgaatgaatttatattcacagagtgttccatttattttataaatgttatcttcaaggtcctttgcttttgagagtcagtagtataaacattcctctaaaatattatttaaaaatccaaatataagtgactaccatgccatattttatatgttgtatttagtctctgaagtgcacatattgctaaaactgcaatgcaaacactgtcttaatttttcttcaataaaatattaaaatatatttttatatacataaacctgtaccttagtgaatattttagattagggtaatacagacactgaagattatttgagaactgtacttggcataaactcatttcattgttataaaaaacaacttctattccagatgcctttgagtgttcaaggatgctctgtgatcagtattatttatcatctccagaattaaagcttacacaagtgaatggtaagttataagtaaaatatattttaacctatggaaaattctgtgttctcctaatattattgctttttgtaaatataaagcaacttctgtgttc

SEQ ID NO: 53 - DNA, 552 bp, Homo sapiens; identical to SEQ ID NO: 52

SEQ ID NO: 54 - DNA, 472 bp, Artificial Sequence
  Description of Artificial Sequence: Synthetic polynucleotide
gagtagctggattttttaaagcaattgcagaacacctgctttttctttgtttcctctagaaaggaccaaccacgccgagctcagttatggcacacacagtgggacctagacaaagggagagggtgaccgacatcccaactagatttcagtggagtgaagttcaggaggcatggagctgacaaccatgaggcctcggcagccaccgccaccaccgccgccgccaccaccgtagcagcagcagcagcagcagcagcagcaagagtaactttgacttaggaatagagacagccagagagaaatgtgatcaatgaaggagacatttggagtgtgcgtgctttttcagagggacgggtgatgggcagattggaaaaagcaccgcagatgggaaccttaatcttttttttttaaaattgatgctatgaaaatttgcgttttctgtaacttgtaaaaactaaaagttgcttgtttactg

SEQ ID NO: 55 - DNA, 289 bp, Homo sapiens
caagcgattctcctgcctcagcccctcaagtagctgggactacaggcgcacaccaccacgcctgactaattttttgtatttttttgtagaggcggggtttcaccatgttgcccagactggtcttgaactcctgagcttaagcaatccacctgcctcggcctcccaaagtgttgggatcacaggcgtgagccaccgcatccggcctcatgttctttttcattaaagagagaaatcaactattcaggaccggcccccacctttcctcaggagtcatttctgttccgcacag

SEQ ID NO: 56 - DNA, 267 bp, Homo sapiens
caggcgtgaacaccgcatccggcctcatgttctttttcattaaagagagaaatcaactattcaggaccggcccccacctttcctcaggagtcatttctgttccgcacaggcctgctgaactgggtgctttatataggacactgtcatctctcaagtacccatcttggagggtacggaccccacatgaggaaaggaccaaccacgccgagctcagttatggcacacacagtgggacctagacaaagggagagggtgaccgacatccca

SEQ ID NO: 57 - DNA, 378 bp, Homo sapiens
gggtgagactcctcttgctcgtcatgtctggccgcggcaaaggcgggaagggtcttggcaaaggcggcgctaagcgccaccgtaaagtactgcgcgacaatatccagggcatcaccaagccggccatccggcgccttgctcgccgcggcggcgtgaagcgcatctccggcctcatctacgaggagactcgcggggtgctgaaggtgttcctggagaacgtgatccgggacgccgtgacctatacagagcacgccaagcgcaagacggtcaccgccatggatgtggtttacgcgctcaagcgccagggccgcaccctctacggtttcggtggttgagcgtccttttctaccaataaaaggcccttttcagggccaccct

SEQ ID NO: 58 - DNA, 304 bp, Homo sapiens
atgctgagtatgggagacaagacagatcctctgcagtcccaagtctgaagatgcaggcagtaaaacaaagaaattaaaatgctgtgcaatgagtgagtcacagtgctgtaagaccacattgcctaggcagccatgcccttggaagtggtgatgtctaagtgagaactgatagattagtaagaggttgctctggccaggcacagtagctcatgcctgtaattccaacattttgggaagcaggaggatcacttaaggccaagagttctagactagcctagacaacacagggagacccagtatttac

SEQ ID NO: 59 - DNA, 601 bp, Homo sapiens
aaaaggatgaatttctgtgactgccagtcagatcttaacaggtttctgtgagccagaatctgtttcagatccaagatggagaggaacactatggaaacttcccaggtgactttcagagcagttgtttcaaacacatcattgtccttttaggggaaccagtttttagaaggttgtgaattggctttttcacaaagcatgattatcttcctggctgatccaggagaaaattagaacagaaaaataatggttgtggattttgaaacaaagcaaggtaaagccttttttttttcaccttgcattggcaaaactacctcttcagtgtttttaacttttgattcaaaagcatcttaccaataaggataaatatcatatacatcgttatgaaaatattgctatgagataataagccacatatgaatgttgtatacaactttagggtttacatttaatcctgaagtgttacctcctttcatgtctatttacactattttcccatttactaagtggggagggggtctccttatatagtgcttcatcgttaataagtcaatacctgttgttcctgggatgttcttttttgtgcattaaaaacttcaaaatt

SEQ ID NO: 60 - DNA, 601 bp, Homo sapiens; identical to SEQ ID NO: 59

SEQ ID NO: 61 - DNA, 672 bp, Homo sapiens
ggtgcctggctgagaatgctggagacgttgcatttgtgaaagatgtcactgtcttgcagaacactgatggaaataacaatgaggcatgggctaaggatttgaagctggcagactttgcgctgctgtgcctcgatggcaaacggaagcctgtgactgaggctagaagctgccatcttgccatggccccgaatcatgccgtggtgtctcggatggataaggtggaacgcctgaaacaggtgttgctccaccaacaggctaaatttgggagaaatggatctgactgcccggacaagttttgcttattccagtctgaaaccaaaaaccttctgttcaatgacaacactgagtgtctggccagactccatggcaaaacaacatatgaaaaatatttgggaccacagtatgtcgcaggcattactaatttgaaaaagtgctcaacctcccccctcctggaagcctgtgaattcctcaggaagtaaaaccgaagaagatggcccagctccccaagaaagcctcagccattcactgcccccagcttttctccccaggtgtgttggggccttggcctcccctgctgaaggtggggattgcccatccatctgcttacaattccctgctgtcgtcttagcaagaagtaaaatgagaaattttgttgatattctctccgcacaa

SEQ ID NO: 62 - DNA, 597 bp, Homo sapiens
gaagctggggtctggaccttcaatcaaagccttagatgggagatctcaagtttcaacaccacgttttggcaaaacgttcgatgccccaccagccttacctaaagctactagaaaggctttgggaactgtcaacagagctacagaaaagtctgtaaagaccaagggacccctcaaacaaaaacagccaagcttttctgccaaaaagatgactgagaagactgttaaagcaaaaagctctgttcctgcctcagatgatgcctatccagaaatagaaaaattctttcccttcaatcctctagactttgagagttttgacctgcctgaagagcaccagattgcgcacctccccttgagtggagtgcctctcatgatccttgacgaggagagagagcttgaaaagctgtttcagctgggccccccttcacctgtgaagatgccctctccaccatgggaatccaatctgttgcagtttccttcaagcattctgtcgaccctggatgttgaattgccacctgtttgctgtgacatagatatttaaatttcttagtgcttcagagtttgtgtgtatttgtattaataaagcattctttaacagat

SEQ ID NO: 63 - DNA, 635 bp, Artificial Sequence
  Description of Artificial Sequence: Synthetic polynucleotide
tatgataacttaccaaagaggaagctgggcccatactacctgcctcaagtgaagcaaaattgtttcctaagaaggttaatacattaccaaagtttcagaatgaggacatgttcatgtgaattttttaaggcaactccttttggcatctatgagagtagctgtgcttttattttacttagatttgtgggaaatatatgctaataatgttccagcctgaaaaaataacaggtatcaagatactcaagtccttaagctgaccttgttagaaatcctgggaaaggaaagctgactgttccaaagctgtcagtggggtgccagacattcactgtttgaacttaaaaacttggtgcatgttggctgggcacagtggctcacgcttgtaatcccagcactttgggaggccgaggcaggtggatcacaagttcagtggttctagaccagcctggccaacacagtgaaaccccgtctatactaaaaatacaaaaattagctgggtgtggtggcgggtgcctgtaaccccagctacttgggaggctgaggcaagagaatcgcttgaacccgggaggcagaggttgcagtgagccgagatcgtgcccctgcactccagcttgggcaacagagctagactccgtctc

SEQ ID NO: 64 - DNA, 532 bp, Homo sapiens
ttcagtcttttcctgtttttgttaactttgggttaaaaaaaaaaaaaagtctgattggttttaattgaaggaaagatttgtactacagttcttttgttgtaaagagttgtgttgttcttttcccccaaagtggtttcagcaatatttaaggagatgtaagagctttacaaaaagacacttgatacttgttttcaaaccagtatacaagataagcttccaggctgcatagaaggaggagagggaaaatgttttgtaagaaaccaatcaagataaaggacagtgaagtaatccgtaccttgtgttttgttttgatttaataacataacaaataaccaacccttccctgaaaacctcacatgcatacatacacatatatacacacacaaagagagttaatcaactgaaagtgtttccttcatttctgatatagaattgcaattttaacacacataaaggataaacttttagaaacttatcttacaaagtgtattttataaaattaaagaaaataaaattaagaatgttctcaatc

SEQ ID NO: 65 - DNA, 1158 bp, Homo sapiens
ccctcaacagtgagttagactcaagggggtgacagaaccgagaagggggtgacagtcctccatccacgtggcctctctctctctcctcaggaccctcagccctggcctttttctttaaggtcccccgaccaatccccagcctaggacgccaacttctcccaccccttggcccctcacatcctctccaggaagggagtgaggggctgtgacatttttccggagaagatttcagagctgaggctttggtacccccaaacccccaatatttttggactggcagactcaaggggctggaatttcatgattccatgcccgagtccgcccatccctgaccatggttttggctctcccaccccgccgttccctgcgcttcatttcatgaggatttctttatgaggcaaatttatattttttaatatcggggggtggaccacgccgccctccatccgtgctgcatgaaaaacattccacgtgccccttgtcgcgcgtctcccatcctgatcccagacccattccttagctatttatccctttcctggtttccgaaaggcaattatatctattatgtataagtaaatatattatatatggatgtgtgtgtgtgcgtgcgcgtgagtgtgtgagcgcttctgcagcctcggcctaggtcacgttggccctcaaagcgagccgttgaattggaaactgcttctagaaactctggctcagcctgtctcgggctgacccttttctgatcgtctcggcccctctgattgttcccgatggtctctctccctctgtcttttctcctccgcctgtgtccatctgaccgttttcacttgtctcctttctgactgtccctgccaatgctccagctgtcgtctgactctgggttcgttggggacatgagattttattttttgtgagtgagactgagggatcgtagatttttacaatctgtatctttgacaattctgggtgcgagtgtgagagtgtgagcagggcttgctcctgccaaccacaattcaatgaatccccgacccccctaccccatgctgtacttgtggttctctttttgtattttgcatctgaccccggggggctgggacagattggcaatgggccgtcccctctccccttggttctgcactgttgccaataaaaagctcttaaaaacgc

SEQ ID NO: 66 - DNA, 590 bp, Homo sapiens
ccctcaacagtgagttagactcaagggggtgacagaaccgagaagggggtgacagtcctccatccacgtggcctctctctctctcctcaggaccctcagccctggcctttttctttaaggtcccccgaccaatccccagcctaggacgccaacttctcccaccccttggcccctcacatcctctccaggaagggagtgaggggctgtgacatttttccggagaagatttcagagctgaggctttggtacccccaaacccccaatatttttggactggcagactcaaggggctggaatttcatgattccatgcccgagtccgcccatccctgaccatggttttggctctcccaccccgccgttccctgcgcttcatttcatgaggatttctttatgaggcaaatttatattttttaatatcggggggtggaccacgccgccctccatccgtgctgcatgaaaaacattccacgtgccccttgtcgcgcgtctcccatcctgatcccagacccattccttagctatttatccctttcctggtttccgaaaggcaattatatctattatgtataagtaaatatattatatatg

SEQ ID NO: 67 - DNA, 671 bp, Homo sapiens
aaagttaaaatgcttagccttgtactgaggctgtatacagccacagcctctccccatccctccagccttatctgtcatcaccatcaacccctcccatgcacctaaacaaaatctaacttgtaattccttgaacatgtcaggcatacattattccttctgcctgagaagctcttccttgtctcttaaatctagaatgatgtaaagttttgaataagttgactatcttacttcatgcaaagaagggacacatatgagattcatcatcacatgagacagcaaatactaaaagtgtaatttgattataagagtttagataaatatatgaaatgcaagagccacagagggaatgtttatggggcacgtttgtaagcctgggatgtgaagcaaaggcagggaacctcatagtatcttatataatatacttcatttctctatctctatcacaatatccaacaagcttttcacagaattcatgcagtgcaaatccccaaaggtaacctttatccatttcatggtgagtgcgctttagaattttggcaaatcatactggtcacttatctcaactttgagatgtgtttgtccttgtagttaattgaaagaaatagggcactcttgtgagccactttagggttcactcctggcaataaagaatttacaaagagctactcagg

SEQ ID NO: 68 - DNA, 706 bp, Homo sapiens
ttgggctggatactgctcttttacttgagcattggttgattaaagtttaggtaccatccaggctggtctagagaagtctttggagttaaccatgctctttttgttaaagaagagagtaatgtgtttatcctggctcatagtccgtcaccgaaaatagaaaatgccatccataggtaaaatgctgacctatagaaaaaaatgaactctacttttatagcctagtaaaaatgctctacctgagtagttaaaagcaattcatgaagcctgaagctaaagagcactctggtggttttggcataatagctgcatttccagacctgacctttggccccaaccacaagtgctccaagccccaccagctgaccaaagaaagcccaagttctccttctgtccttcccacaacctccctgctcccaaaactatgaaattaatttgaccatattaacacagctgactcctccagtttacttaaggtagaaagaatgagtttacaacagatgaaaataagtgctttgggcgaactgtattccttttaacagatccaaactattttacatttaaaaaaaaagttaaactaaacttctttactgctgatatgtttcctgtattctagaaaaatttttacactttcacattatttttgtacactttccccatgttaagggatgatggcttttataaatgtgtattcattaaatgttacttt

SEQ ID NO: 69 - DNA, 186 bp, Artificial Sequence
  Description of Artificial Sequence: Synthetic polynucleotide
ttgggctggatactgctcttttacttgagcattggttgattaaagtttaggtaccatccaggctggtctagagaagtctttggagttaaccatgctctttttgttaaagaagagagtaatgtgtttatcctggctcatagtccgtcaccgaaaatagaaaatgccatccataggtaaaatgctgac

SEQ ID NO: 70 - DNA, 719 bp, Homo sapiens
cacctcaaaataccatgccatttaaagcttattaaaactcatttttgttttcattatctcaaaactgcactgtcaagatgatgatgatctttaaaatacacactcaaatcaagaaacttaaggttacctttgttcccaaatttcatacctatcatcttaagtagggacttctgtcttcacaacagattattaccttacagaagtttgaattatccggtcgggttttattgtttaaaatcatttctgcatcagctgctgaaacaacaaataggaattgtttttatggaggctttgcatagattccctgagcaggattttaatctttttctaactggactggttcaaatgttgttctcttctttaaagggatggcaagatgtgggcagtgatgtcactagggcagggacaggataagagggattagggagagaagatagcagggcatggctgggaacccaagtccaagcataccaacacgagcaggctactgtcagctcccctcggagaagagctgttcacagccagactggcacagttttctgagaaagactattcaaacagtctcaggaaatcaaatatgcaaagcactgacttctaagtaaaaccacagcagttgaaaagactccaaagaaatgtaagggaaactgccagcaacgcaggcccccaggtgccagttatggctataggtgctacaaaaacacagcaagggtgatgggaaa

SEQ ID NO: 71 - DNA, 913 bp, Homo sapiens
gtttagaagccaaactcaaggaggatgcaaaaattctttggcctacctataactggaatgttaaactcccacgtcatagaaaataatgcagaagcccagatgtggagtgccagatgttgcagaatactcactatttccaaatagcccaaaatggacttccaaagtggtcacctacaggatcgtatcatatactcgagacttaccgcatattacagtggatcgattagtgtcaaaggctttaaacatgtggggcaaagagatccccctgcatttcaggaaagttgtatggggaactgctgacatcatgattggctttgcgcgaggagctcatggggactcctacccatttgatgggccaggaaacacgctggctcatgcctttgcgcctgggacaggtctcggaggagatgctcacttcgatgaggatgaacgctggacggatggtagcagtctagggattaacttcctgtatgctgcaactcatgaacttggccattctttgggtatgggacattcctctgatcctaatgcagtgatgtatccaacctatggaaatggagatccccaaaattttaaactttcccaggatgatattaaaggcattcagaaactatatggaaagagaagtaattcaagaaagaaatagaaacttcaggcagaacatccattcattcattcattggattgtatatcattgttgcacaatcagaattgataagcactgttcctccactccatttagcaattatgtcacccttttttattgcagttggtttttgaatgtctttcactccttttaaggataaactcctttatggtgtgactgtgtcttattcatctatacttgcagtgggtagatgtcaataaatgttacatacacaaataaataaaatgtttattccatggtaaattt

SEQ ID NO: 72 - DNA, 625 bp, Homo sapiens
gaagtaaaattgagtgcactaaacgaataagattctgaggaagtcttatcttctgcagtgagtatggcccaatgctttctgtggctaaacagatgtaatgggaagaaataaaagcctacgtgttggtaaatccaacagcaagggagatttttgaatcataataactcataaggtgctatctgttcagtgatgccctcagagctcttgctgttagctggcagctgacgctgctaggatagttagtttggaaatggtacttcataataaactacacaaggaaagtcagccactgtgtcttatgaggaattggacctaataaattttagtgtgccttccaaacctgagaatatatgcttttggaagttaaaatttaaatggcttttgccacatacatagatcttcatgatgtgtgagtgtaattccatgtggatatcagttaccaaacattacaaaaaaattttatggcccaaaatgaccaacgaaattgttacaatagaatttatccaattttgatctttttatatttttttaccacacctggaaacagaccaatagacattttggggttttataatgggaatttgtataaagcattactctttttcaataaattgttttttaattt

SEQ ID NO: 73 - DNA, 625 bp, Homo sapiens; identical to SEQ ID NO: 72

SEQ ID NO: 74 - DNA, 512 bp, Homo sapiens
ctttccaaccacttgggaatttaaatgaagattgaacaatagtaggggaaaaactgctgtggttttactgggaacttgcttttccttctagatgccaagtgctttaaattctaaatgtactaaatccaggagaagattttccaagtagagactgaatgaatctttgtaactaatgggaacatgattagtcacatttccaggcagctagtcaagaagtattgtttcagcgatttttcaggtagatggttttgatttgtctgttttccttttggtcctctctaggtgggctctccttttgcagactcctcttgcaaggcgtacctccaaacataattgattcatatttgcgagacttacactcaagcaatcctgaggaatactgagggagggcctggctactgtctttttgcactttgctgctttgaaatttggttgaaatgagaaaaagcattttctgttttcccaccaggcccccaagtgtggtctttttctttcctcctaatgttgaagag

SEQ ID NO: 75 - DNA, 512 bp, Homo sapiens; identical to SEQ ID NO: 74

SEQ ID NO: 76 - DNA, 602 bp, Homo sapiens
gaactgtgcatgcgaaggatctgggttgcatgctctttatgagatcaaactaatgcctgatgatctcaggtggaacagtttaatcctgaaaccatccccccgtctgtggaaaaactgccttccaccaaaccagtccctggtgccaaaaacgctgggaaccgctaatctagacagttctctgctaaggaagcacatggttgagaagcatcagaatcgttcccacggaccatgctccggagtctcagcaggctcctgcaggtgagccccactggcctctcctcttccttccggacctcctcagctttggtaatggaaagctgcatcctcttctgtccccagttcctctctgggtgtcaggatctctaaaaccctttcagccgctgagaaatctgtctgtctgtctcacagtgtgtttatccgtgcatcatgaaggaccctcatacggctgacgtgccttggctgatgcgaataacactgcagcaagcgtgggagtgcagatagctcttggaaatacccatttccttcagacgcatactcagaggtaggattgctggattgtttggtcattttgatttttaaaattaaaaagaattttaattctc

SEQ ID NO: 77 - DNA, 586 bp, Homo sapiens
tttttggaaacgtcagagatgtgaagcgcctggaatctacaactcggagtccagtgttttcccacttgtcatcttctctccaggggctctggaccatccgggcatacaaagcagaagagaggtgtcaggaactgtttgatgcacaccaggatttacattcaggtctgtctatttctggaaatggtttcaaaggacaggatctgctgctttttctggcttaacctccctggtcagatgagcttgttggcaggcacctcagggcccagccccacatcctgctttttttgcgcatcttcgtctccttccccatccccttcttctgggcttggactcctttcggaatcgctgctgcacgttccctctttgtgccccctgactggcttgtggggtctttctctcaccatgcatggcctgtggctctgtcagcaaacgttttctgcaaaaggccacctagtaagtgttttaggcattgtgtgccattattgtttctgttgtgatgaatcacctttgccattgtagcacaaaagcagatgtcaatacattggcaaatggctgtgactatgtttcaataaaactttattcccaa

SEQ ID NO: 78 - DNA, 1226 bp, Homo sapiens
ggtggatgatttaaatcaccctagtgtgctgagaccctgagaataaaagtgtgtgattggttccatacttgaaagacgggatataaaaggaaagaaatatttccctttaatggtgtttctcccaggaatggttgcctgtttcttctcttgtggtcttcaatgccctggggactggaagggttgatagttttaagttgggttctttaccgcctcctttttccttttaatctttatttttgatgaacacatatataggagaacatctatcctatgaataagaacctggtcatgctttactcctgtattgttattttgttcatttccaattgattctctacttttcccttttttgtattatgtgactaattagttggcatattgttaaaagtctctcaaattaggccagattttaaaacatgctgcagcaagaggaccccgctctcttcaggaaaagtgttttcatttctcaggatgcttcttacctgtcagaggaggtgacaaggcagtctcttgctctcttggactcaccaggctcctattgaaggaaccacccccattcctaaatatgtgaaaagtcgcccaaaatgcaaccttgaaaggcactactgactttgttcttattggatactcctcttatttattatttttccattaaaaataatagctggctattatagaaaatttagaccatacagagatgtagaaagaacataaattgtccccattaccttaaggtaatcactgctaacaatttctggatggtttttcaagtctattttttttctatgtatgtctcaattctctttcaaaattttacagaatgttatcatactacatatatactttttatgtaagctttttcacttagtattttatcaaatatgtttttattatattcatagccttcttaaacattatatcaataattgcataataggcaacctctagcgattaccataattttgctcattgaaggctatctccagttgatcattgggatgagcatctttgtgcatgaatcctattgctgtatttgggaaaattttccaaggttagattccaataaatatctatttattattaaatattaaaatatctatttattattaaaaccatttataaggctttttcataaatgtatagcaaataggaattattaacttgagcataagatatgagatacatgaacctgaactattaaaataaaatattatatttaaccccaa

SEQ ID NO: 79 - DNA, 601 bp, Homo sapiens
ggtggatgatttaaatcaccctagtgtgctgagaccctgagaataaaagtgtgtgattggttccatacttgaaagacgggatataaaaggaaagaaatatttccctttaatggtgtttctcccaggaatggttgcctgtttcttctcttgtggtcttcaatgccctggggactggaagggttgatagttttaagttgggttctttaccgcctcctttttccttttaatctttatttttgatgaacacatatataggagaacatctatcctatgaataagaacctggtcatgctttactcctgtattgttattttgttcatttccaattgattctctacttttcccttttttgtattatgtgactaattagttggcatattgttaaaagtctctcaaattaggccagattttaaaacatgctgcagcaagaggaccccgctctcttcaggaaaagtgttttcatttctcaggatgcttcttacctgtcagaggaggtgacaaggcagtctcttgctctcttggactcaccaggctcctattgaaggaaccacccccattcctaaatatgtgaaaagtcgcccaaaatgcaaccttgaaaggc

SEQ ID NO: 80 - DNA, 833 bp, Homo sapiens
ccccctggtgtgcatctacatgttatccaccaacatcctgctggtcaacctgctggtcgccatgtttggctacacggtgggcaccgtccaggagaacaatgaccaggtctggaagttccagaggtacttcctggtgcaggagtactgcagccgcctcaatatccccttccccttcattgtcttcgcttacttctacatggtggtgaagaagtgcttcaagtgttgctgcaaggagaaaaacatggagttttctgtctgctgtttcaaaaatgaagacaatgagactttggcatgggagggtgtcatgaaggaaaactaccttgtcaagatcaacacaaaagccaacgacacctcagaggaaatgaggcatcgatttagacaactggatacaaagcttaatgatctcaagggtcttctgaaagagattgctaataaaatcaaataaaactgtatgaactctaatggagaaaaatctaattatagcaagatcatattaaggaatgctgatgaacaattttgctatcgactactaaatgagagattttcagacccctgggtacatggtggatgattttaaatcaccctagtgtgctgagaccttgagaataaagtgtgtgattggtttcatacttgaagacggatataaaggaagaatatttcctttatgtgtttctccagaatggtgcctgtttctctctgtgtctcaatgcctgggactggaggttgatagtttaagtgtgttcttaccgcctcctttttcctttaatcttatttttgatgaacacatatataggagaacatctatcctatgaataagaacctggtcatgcttt

SEQ ID NO: 81 - DNA, 645 bp, Homo sapiens
gggagagaagtttgaagcacaactcccttaaggtctccaaaccagacggtgacgcctgcgggaccatctggggcacctgcttccacccgtctctctgcccactcgggtctgcagacctggttcccactgaggccctttgcaggacggaactacggggcttacaggagcttttgtgtgcctggtagaaactatttctgttccagtcacattgccatcactcttgtactgcctgccaccgcggaggaggctggtgacaggccaaaggccagtggaagaaacaccctttcatctcagagtccactgtggcactggccacccctccccagtacaggggtgctgcaggtggcagagtgaatgtcccccatcatgtggcccaactctcctggcctggccatctccctccccagaaacagtgtgcatgggttattttggagtgtaggtgacttgtttactcattgaagcagatttctgcttccttttatttttataggaatagaggaagaaaggtcagatgcgtgcccagctcttcaccccccaatctcttggtggggaggggtgtacctaaatatttatcatatccttgcccttgagtgcttgttagagagaaagagaactactaaggaaaataatattatttaaactcgc

SEQ ID NO: 82 - DNA, 576 bp, Homo sapiens; identical to SEQ ID NO: 21

SEQ ID NO: 83 - DNA, 576 bp, Homo sapiens; identical to SEQ ID NO: 21

SEQ ID NO: 84 - DNA, 628 bp, Homo sapiens
ggaccagagcctcttcgaggccttcttggagcccctgggcaccctgggctactgtggggctgtgggcctgttacccccaggcacagcagctccctccggctgggcccaggctccactcagtgacacggctcaagtttacatggagctgcagggcctggtggacccgcagatccagctacctctgttagccgcccgaaggtacaagttgcagaagcagcttgatagcctcacagccaggaccccatcagaaggggaggcagggactcagaggcaacaaaagctttcttccctccagctggaattgtcaaaactggacaaggcagcctttcacctccggcagctgatggatgagcctccagccccagggagcccggagctttaactcatcatccccatcagttttcctccctttcagacctgtctttgaggacaaacagatttgtcagctgtcagggtgcagtgggacgtcagagactatgtggtccatcgccttcattgtgtaaatgaggacacagactggcttggtcgcagtgactgtggtgtccttgagatgctcacattactgcccggcctgcctcccacctggaagtctgggaatgaggagattgagataaacttttgaaatccc

SEQ ID NO: 85 - DNA, 1186 bp, Homo sapiens
aaaaaaaaaaatggatacatggttaaaggatagaagggcaatattttatcatatgttctaaaagagaaggaagagaaaatactactttctcaaaatggaagcccttaaaggtgctttgatactgaaggacacaaatgtgaccgtccatcctcctttagagttgcatgacttggacacggtaactgttgcagttttagactcagcattgtgacacttcccaagaaggccaaacctctaaccgacattcctgaaatacgtggcattattcttttttggatttctcatttatggaaggctaaccctctgttgactgtaagccttttggtttgggctgtattgaaatcctttttaaattgcatgaataggctctgctaacgtgatgagacaaactgaaaattattgcgagcattgactataattatgcagtacgttctcaggatgcatccaggggttcattttcatgagcctgtccaggttagtttactcctgaccactaatagcattgtcatttgggctttctgttgaatgaatcaacaaaccacaatacttcctgggaccttttgtactttatttgaactatgagtctttaatttttcctgatgatggtggctgtaatatgttgagttcagtttactaaaggttttactattatggtttgaagtggagtctcatgacctctcagaataaggtgtcacctccctgaaattgcatatatgtatatagacatgcacacgtgtgcatttgtttgtatacatatatttgtccttcgtatagcaagttttttgctcatcagcagagagcaacagatgttttattgagtgaagccttaaaaagcacacaccacacacagctaactgccaaaatacattgaccgtagtagctgttcaactcctagtacttagaaatacacgtatggttaatgttcagtccaacaaaccacacacagtaaatgtttattaatagtcatggttcgtattttaggtgactgaaattgcaacagtgatcataatgaggtttgttaaaacgatagctatattcaaaatgtctatatgtttatttggacttttgaggttaaagacagtcatataaacgtcctgtttctgttttaatgttatcatagaattttttaatgaaactaaattcaattgaaataaatgatagttttcatctccattcagagatctgt

SEQ ID NO: 86 - DNA, 650 bp, Homo sapiens
aaaaaaaaaaatggatacatggttaaaggatagaagggcaatattttatcatatgttctaaaagagaaggaagagaaaatactactttctcaaaatggaagcccttaaaggtgctttgatactgaaggacacaaatgtgaccgtccatcctcctttagagttgcatgacttggacacggtaactgttgcagttttagactcagcattgtgacacttcccaagaaggccaaacctctaaccgacattcctgaaatacgtggcattattcttttttggatttctcatttatggaaggctaaccctctgttgactgtaagccttttggtttgggctgtattgaaatcctttttaaattgcatgaataggctctgctaacgtgatgagacaaactgaaaattattgcgagcattgactataattatgcagtacgttctcaggatgcatccaggggttcattttcatgagcctgtccaggttagtttactcctgaccactaatagcattgtcatttgggctttctgttgaatgaatcaacaaaccacaatacttcctgggaccttttgtactttatttgaactatgagtctttaatttttcctgatgatggtggctgtaatatgttgagttcagtttactaaaggttttactatt

SEQ ID NO: 87 - DNA, 166 bp, Homo sapiens
tcgcagccacaggatgctgataaaaataccagtgttattaccgtatgtaaatcttgtgtcattttctttcaagtgactgaactggcctttgcttaaacacttgacttctcaggaaacaaaaagctaactccgggtgtggggtaaattgagaatcctgtggctggcg

SEQ ID NO: 88 - DNA, 1019 bp, Homo sapiens
cacacatctgctgaaatggagataattaacatcactagaaacagcaagatgacaatataatgtctaagtagtgacatgttttgcacatttccagcccctttaaatatccacacacacaggaagcacaaaaggaagcacagagatccctgggagaaatgcccggccgccatcttgggtcatcgatgagcctcgccctgtgcctggtcccgcttgtgagggaaggacattagaaaatgaattgatgtgttccttaaaggatgggcaggaaaacagatcctgttgtggatatttatttgaacgggattacagatttgaaatgaagtcacaaagtgagcattaccaatgagaggaaaacagacgagaaaatcttgatggcttcacaagacatgcaacaaacaaaatggaatactgtgatgacatgaggcagccaagctggggaggagataaccacggggcagagggtcaggattctggccctgctgcctaaactgtgcgttcataaccaaatcatttcatatttctaaccctcaaaacaaagctgttgtaatatctgatctttacggttccttctgggcccaacattctccatatatccagccacactcatttttaatatttagttcccagatctgtactgtgacctttttacactgtagaataacattactcattttgttcaaagaccctttcgtgttgctgcctaatatgtagctgactgtttttcctaaggagtgttctggcccaggggatctgtgaacaggctgggaagcatctcaagatctttccagggttatacttactagcacacagcatgatcattacggagtgaattatctaatcaacatcatcctcagtgtctttgcccatactgaaattcatttcccacttttgtgcccattctcaagacctcaaaatgtcattccattaatatcacaggattaacttttttttttaacctggaagaattcaatgttacatgcagctatgggaatttaattacatattttgttttccagtgc

SEQ ID NO: 89 - DNA, 529 bp, Homo sapiens
cacacatctgctgaaatggagataattaacatcactagaaacagcaagatgacaatataatgtctaagtagtgacatgttttgcacatttccagcccctttaaatatccacacacacaggaagcacaaaaggaagcacagagatccctgggagaaatgcccggccgccatcttgggtcatcgatgagcctcgccctgtgcctggtcccgcttgtgagggaaggacattagaaaatgaattgatgtgttccttaaaggatgggcaggaaaacagatcctgttgtggatatttatttgaacgggattacagatttgaaatgaagtcacaaagtgagcattaccaatgagaggaaaacagacgagaaaatcttgatggcttcacaagacatgcaacaaacaaaatggaatactgtgatgacatgaggcagccaagctggggaggagataaccacggggcagagggtcaggattctggccctgctgcctaaactgtgcgttcataaccaaatcatttcatatttctaaccctc

SEQ ID NO: 90 - DNA, 1219 bp, Homo sapiens
ttggaagaataactaatacaattcattgtgaacagaagtccttaagcagaggaattggtgtgccttaaagatacaatctgggatagtttgggggaacttgtagccagaatgccctgttcatgctgagcaaagttcagcaagtagagcagaataaggcaggcaggtgccaggaactcccctttttcctggagtgccttcattgaggaaggaaatttggcccttgggtttcctggttccactgctactgacccagaggggaatgagggctgagttatgaaaagataacttcatgaagacttaactggcccagaagctgattttcatgaaaatctgccactcagggtctgggatgaaggcttgtcagcacttccagtttagaacgcaatgtttctagagacatattggctgtttgttttgatgataaaaggagaataagaaaaggcatcactttcctggatccaggataatttttaaaccaatcaaatgaaaaaaacaaacaaacaaaaaaggaaatgtcatgtgaggttaaaccagtttgcattcccctaatgtggaaaaagtaagaggactactcagcactgtttgaagattgcctcttctacagcttctgagaattgtgttatttcacttgccaagtgaaggaccccctccccaacatgccccagcccacccctaagcatggtcccttgtcaccaggcaaccaggaaactgctacttgtggacctcaccagagaccaggagggtttggttagctcacaggacttcccccaccccagaagattagcatcccatactagactcatactcaactcaactaggctcatactcaattgatggttattagacaattccatttctttctggttattataaacagaaaatctttcctcttctcattaccagtaaaggctcttggtatctttctgttggaatgatttctatgaacttgtcttattttaatggtgggttttttttctggtaagatttagacctaaatcgcatcatgccaacttgtgactttgagactattcatcaagaatgaggatatagtagccatgacatagcttgagctatagcctttaattccttactttggctatgggtggagggtgagtttgaagaggttttgattttcttgtaacctgggaaagccatgaccttgtgcccgattctttcagattgctttgggtaataaatattggtggtggtatttgcccaa

SEQ ID NO: 91 - DNA, 430 bp, Homo sapiens
ttggaagaataactaatacaattcattgtgaacagaagtccttaagcagaggaattggtgtgccttaaagatacaatctgggatagtttgggggaacttgtagccagaatgccctgttcatgctgagcaaagttcagcaagtagagcagaataaggcaggcaggtgccaggaactcccctttttcctggagtgccttcattgaggaaggaaatttggcccttgggtttcctggttccactgctactgacccagaggggaatgagggctgagttatgaaaagataacttcatgaagacttaactggcccagaagctgattttcatgaaaatctgccactcagggtctgggatgaaggcttgtcagcacttccagtttagaacgcaatgtttctagagacatattggctgtttgttttgatgataaaaggag

SEQ ID NO: 92 - DNA, 613 bp, Homo sapiens
tcagaggagaaccgttctgaaggaaaagttggtttcaggcctataagaattaattcagagctggtgctcactggaatgtcttcattttccttattctcctaaacactgcagctcaggttgcctatgtgcttcaagattggtggctttcatactgggcaaacaaacaaagtatgctaaatgtcactgtaaatggaggaggaaatgtaaccgagaagctagatcttaactggtacttaggaatttattcaggtttaactgtagctaccgttctttttggcatagcaagatctctattggtattttacgtccttgttaactcttcacaaactttgcacaacaaaatgtttgagtcaattttgaaagctccggtattattctttgatagaaatccaataggaagaattttaaatcgtttctccaaagacattggacacttggatgatttgctgccgctgacgtttttagatttcatccaggtaacgttgagagtaatgtcaggatctcaaatggaaaacggaagttcctattttttcaagcccttttcatggggtctgggggtgggactctcggcctggctgtgtgtaatgttaacttaataaagggccatgtttgt

SEQ ID NO: 93 - DNA, 613 bp, Homo sapiens; identical to SEQ ID NO: 92

SEQ ID NO: 94 - DNA, 631 bp, Homo sapiens
tccttgttaactcttcacaaactttgcacaacaaaatgtctgagtcaattctgaaagctccggtattattctttgatagaaatccaataggaagaattttaaatcgtttctccaaagacattggacacttggatgatttgctgccgctgacgtttttagatttcatccagagatgggatctcgctgtgttgtcctggctggtctcaaactcctaggctcaagcaatcctcctccctcctcaagcaaacctcagtgctgggattataggcatgagccactgtacctggctaaatgttgtttttttgatattcaatttttgtttatagaattttcatttgttttgctcttatacttttcatctttttatgtttattgaccaattgaatatcatttgggtaagcacctatttaagtgtcttaacaatttttctattgagtactctgggtttttgttttgtttttcttactgatttgtagaattctttatgtattttgaattgcagataccttccttctgtactaatgcttatctttttagccctgtaatattgtgttttcataaacatacttatcaatcttttcctttatggtcattgatttttgtgttctgtttaaaaaaatctgtatctatt

SEQ ID NO: 95 - DNA, 631 bp, Homo sapiens; identical to SEQ ID NO: 94

SEQ ID NO: 96 - DNA, 583 bp, Homo sapiens
aactaagcattaatcttccatctgaaattgtcaggaaaccttgagatcaaaagaacatccctgggaaggtgttaggctcagcttattattatgtgggggctcagcgtctatacccacctgaagctgggctgtccatgaggcttcagttcactaaccagatgtgcatgaaacagatacaaaaaggggaagcctttagggccaaaaaatagacctaggtttgtattactatttcagcttaatcgtgtataccttgtgtttcctcggccaacaatggctaattatggtaaatactatttagaattatgtgctatgtactaagtgtttgacatatggtatttcatttaaaccttctgtgatcctttgaagagtgtcctccaatttttcccattttaacagatgataaaactcacagaagggcctatggttatatagctagtaaaagtggcagagtccgttgaacttgaattcagattggggaatgctttaacagttggtatccagcagctacaggacttaatatttttcagtgttgtttcctcatctttaaattgaagatattaaagctcactttgtaaaattgcaa

SEQ ID NO: 97 - DNA, 120 bp, Homo sapiens
ttttttaggttttattctattgaaatttattaaaatccttcatttatcttccagatagtagattctattaaccaagttgcataaagagttctgattcccagaaggtaaagaaactgagcc

SEQ ID NO: 98 - DNA, 651 bp, Homo sapiens
ttagggcagggctgactttggtgacactgcccattccctctcaggccagctcaggtcacccgggcctctgacccaggcctgtcactttgagaggggcaaaactgagaggggcttttcctagagaaagagaacaaggagcttgccaggcttcatgtagccgacacacgtctcaggattttaagtccacattggcctcacactaccagggccaatgcccaaaataaggagttccaatttggggccaaatgaggaaggacacagactctgccctgggatctcctgtgctagcggccaatgacaaatccagtcattggccaccagccacctttgcagtggggaccacactagcagccctgactccacactcctcctggggacccaagaggcagtgttgctgtttgcgtgtccaccttggaatctggctgaactggctgggaggaccaagactgcggctggggtgggcagggaagggaagccgggggctgctgtgagggatcttggagcttccctgtagcccaccttccccttgcttcatgtttgtagaggaaccttgtgccggccaggcccagtttccttgtgtgatacactaatgtatttgctttttttggaaatagagaaaatcaataaattgctagtgtttctttgaacttt

SEQ ID NO: 99 - DNA, 613 bp, Homo sapiens
taggaatattcttctctgagccctaggattgattctatcacacagagcaacattaatctaaatggtttagctccctcttttttctctaaaaacaatcagctaataaaaaaaaaatttgagggcctaaattatttcaatggttgtttgaaatattcagttcagtttgtacctgttagcagtctttcagtttgggggagaattaaatactgtgctaagctggtgcttggatacatattacagcatcttgtgttttatttgacaaacagaattttggtgccataatattttgagaattagagaagattgtgatgcatatatataaacactatttttaaaaaatatctaaatatgtctcacatatttatataatcctcaaatatactgtaccattttagatattttttaaacagattaatttggagaagttttattcattacctaattctgtggcaaaaatggtgcctctgatgttgtgatatagtattgtcagtgtgtacatatataaaacctgtgtaaacctctgtccttatgaaccataacaaatgtagctttttaaagtccattgtattgttttttctttcaataaaagagtataattaattggttgtttttg

SEQ ID NO: 100 - DNA, 613 bp, Homo sapiens; identical to SEQ ID NO: 99

SEQ ID NO: 101 - DNA, 1245 bp, Homo sapiens
cagcaaagccgggaagcaccttcagctgaaggaaacctttgaagaggcacagtcgggtgtacacatttgagatgcagatcatcaaggccaaagataactttgcaggaaattacagatgcgaggtcacctataaggataagtttgacagctgttcatttgatcttgaagtgcacgaatctactgggactactccaaacattgacatcagatctgctttcaagagaagtggagaaggtcaagaggatgcaggagaacttgactttagtggtctcctgaaacgtaggtgagaacaaagtgatggagtgagacattgtggcctggaagtctttcagacacccactcagagaagtcaagtttaaagtggatgttcttcagagaatttttcatttctgaaaatgtgttttgcttatagaatataacagagttgactagaaagagagaaacaactgcatactaatcttttaaagcctttaacagttgcttttaaactttctttttaaatgtttcatgactcttcacctatttttttttaaatggggacgaagagatatgaaaactgagacataagacaaatacctagaaacctttaagactgcacatatgatttggtagaagtctgaaggtatacacattgtaagaggcagacctactttaatgtattatttatgatgtactgtatttctgcaagtttaagacaccactgctattaagatacaccagcactttataaatcactaagcaatgaaaaaattgttccaaatggtttgacacaccattgattataagatgcattgtcatttcagaggtctttaaaatgcctcaaaaatgtgttttagaagtgacaaaatggaaataaaagtttagtatcatcacacactgacacttttcattgttctctcctgcaataaaatttataggatttcattatggatacttagaacataaccattttataagatttctctccatatatatttctataactgctatactcttcactaggattccctatatatatactatattatatgcctgttatagatatctagatatttactatagtgcagaagcaacaaaaagaaacactttttttctgagattatgttttatctagcaaatttgtaaataaacagagtaaaactataattttaaattaattgtatataatatcagttttcatttaactttccaggcttttaaaattacttttagtgctttctatggttattaaaagactacaagtac

SEQ ID NO: 102 - DNA, 1245 bp, Homo sapiens; identical to SEQ ID NO: 101

SEQ ID NO: 103 - DNA, 552 bp, Homo sapiens
cagcaaagccgggaagcaccttcagctgaaggaaacctttgaagaggcacagtcgggtgtacacatttgagatgcagatcatcaaggccaaagataactttgcaggaaattacagatgcgaggtcacctataaggataagtttgacagctgttcatttgatcttgaagtgcacgaatctactgggactactccaaacattgacatcagatctgctttcaagagaagtggagaaggtcaagaggatgcaggagaacttgactttagtggtctcctgaaacgtaggtgagaacaaagtgatggagtgagacattgtggcctggaagtctttcagacacccactcagagaagtcaagtttaaagtggatgttcttcagagaatttttcatttctgaaaatgtgttttgcttatagaatataacagagttgactagaaagagagaaacaactgcatactaatcttttaaagcctttaacagttgcttttaaactttctttttaaatgtttcatgactcttcacctatttttttttaaatggggacgaagagatatg

SEQ ID NO: 104 - DNA, 637 bp, Homo sapiens
tgccttttgcatcaaaatttttaatttattggaacgggtttattatatattctttttaatgcctgtagtatctttctgttattccctgttaattcatgataatgataattttcctctctttttttcttgattagtctttttgaagtttattgatttcatcagtttttttatataatgaggctttgggtttgttgatttttctccttcaaattagttttctatttaatcattttctccttttttctaatttccatttttctcagattttaatttaatatgctactcatttttctatctttgtaaggtatatttttagatcctttacttttaacctgtctttaaaaaaaagtttgaaggaataattttacttgtaaacagcattagttgcagtcctgaaattttaatattattaggttttcatttttttttatttgaaaagtttttaattttattgtaatttatttgaaacaggtgttatatagaaatatattgctgaattcctaacatttctagttacatttttaattacattgatttcatgttaaatccacttatgtcagaatatattctgtataatatctgtctcttgaagtttgatgatacttgctttatggcataataaagatgcacttgaaaa

SEQ ID NO: 105 - DNA, 637 bp, Homo sapiens; identical to SEQ ID NO: 104

SEQ ID NO: 106 - DNA, 732 bp, Homo sapiens
ttggatgcctacaggttactcagcggaggtggcagaagcaagtacgccaaaatctgctttgaggataacctacttatgggagaacagctgggaaatgttgccagaggaataaacattgccattgtcaactatgtaactgggaatgtgacagcaacacgatgttttgatatgtatgaaggcgataactctggaccgatgacaaagtttattcagagtgctgctccaaaatccctgctcttcatggtgacctatgacgacggaagcacaagactgaataacgatgccaagaatgccatagaagcacttggaagtaaagaaatcaggaacatgaaattcaggtctagctgggtatttattgcagcaaaaggcttggaactcccttccgaaattcagagagaaaagatcaaccactctgatgctaagaacaacagatattctggctggcctgcagagatccagatagaaggctgcatacccaaagaacgaagctgacactgcagggtcctgagtaaatgtgttctgtataaacaaatgcagctggaatcgctcaagaattttatttttttaaatccaacagcccatatttgatgagtattttgggtttgttgtaaaccaatgaacatttgctagttgtatcaaatcttggtacgcagtatttttataccagtattttatgtagtgaagatgtcaattagcaggaaactaaaatgaatggaaatttttaaagggcaa

SEQ ID NO: 107 - DNA, 715 bp, Homo sapiens
gccaggatatactatcccctcttatttttatatatcaatgagactttcaaaaacaagtttttataaagatagtgaagacgaagaatagaaaacgcctgcatccacccaataagaaggacacagttgtactctgcagttaacctaagcagaacagtaaataatgagccgcagcgataactctggaccgatgacaaagtttattcagagtgctgctccaaaatccctgctcttcatggtgacctatgacgacggaagcacaagactgaataacgatgccaagaatgccatagaagcacttggaagtaaagaaatcaggaacatgaaattcaggtctagctgggtatttattgcagcaaaaggcttggaactcccttccgaaattcagagagaaaagatcaaccactctgatgctaagaacaacagatattctggctggcctgcagagatccagatagaaggctgcatacccaaagaacgaagctgacactgcagggtcctgagtaaatgtgttctgtataaacaaatgcagctggaatcgctcaagaatcttatttttctaaatccaacagcccatatttgatgagtattttgggtttgttgtaaaccaatgaacatttgctagttgtatcaaatcttggtacgcagtatttttataccagtattttatgtagtgaagatgtcaattagcaggaaactaaaatgaatggaaattttt

SEQ ID NO: 108 - DNA, 933 bp, Artificial Sequence
  Description of Artificial Sequence: Synthetic polynucleotide
ggagttaaggtataatttgaaggttggcagaccagttgcgctgattactcttagagaagaagaaatggaaaaatgaaagaaggcaggaaggaaagaaaggatataggaagagagggaagcagaaggcaggcatttttctattttccccacaaattatttcaaaaaaaatctgtattttctgggatatgtcattggcaagaggaagaactggtgttttgaaagcagtatggattctttaaatgcctctcactcttacaagatagtaggctttgagataataaacttacccgtgtcaattaacatttaaactggcatatagaaaaaaaggaggatttttctgcattgtaaaataatcagtatggtttatatgttgaatttgacatttgtgtgtaatttcatggtggcctagtgttgtggtgcttctggtaatggtaatagaagctcaactatttttttgtggatttcagtttttatcatcagaagtcctagacagtgacatttcttaatggtgggagtccagctcatgcatttctgattatacaaaacagtttgcagtaggttatttgtcatttcagttttttactgaaatttgagctaaacatttttacatgtaaatacttgtatttaccaaagatttaaatcagttgattaattaattaactcaaatactgtgaactatctttaaaacactagaaaaaagaaatgttagtatctcaattacaccaactgtgcaaatgaactttgataaaatagaaataatttacattggcctttgtgaaatctggggaagagctttaggattttagtagatggatactgaatactcaggcccacttaaattattaatgtatacattgtgtttttgtctttatgctatgtacagagaaatgtgataattttttataataaatattttttatgatgataaaagac

SEQ ID NO: 109 - DNA, 160 bp, Homo sapiens
ggagttaaggtataatttgaaggttggcagaccagttgcgctgattactcttagagaagaagaaatggaaaaatgaaagaaggcaggaaggaaagaaaggatataggaagagagggaagcagaaggcaggcatttttctattttccccacaaattatttc

SEQ ID NO: 110 - DNA, 1053 bp, Homo sapiens
tttctaaagggctagttaccaactttatttctgtgtttctgtagaagaaacattttcagttcttcattgagtttgattatggaaatccattcaaagtcactatgaaaattttactcatgtagtttggaaatgcaacattttcctatcatgaaatctctttcagagaggagaatacaacatcttagtccagacatttaacatactgcatttcaagtacgtgtgtgtgtgttttattcaggttgtgtaatgctcccgtagaattatagaacaattaaatatggttagttccagagtgcaaattacagaaggaagctacttgtttaaaattccatacacgtttgcagttttttgtacacatttggatactttgaaagatgacagattgttaaatccattcaatggtaaagaaactcaccatttggagattgagtttacttgttaatgaatgactagcccaattatccttataaattgaatatggtgaccaaatgctttgatatcatactactctgcctttgtgggcacatatgtagacactactaaaaataaatatttttggagattaaaatggagaatagaagtaattacattatttaggtcttaatccaacttttttctaatatatctaaacaattgaaagggaagcttattcatggaatattggcttgatttatctagaaagtttttccttcttcaattttactatattcattctacaggaacagcaataagtactattaaacagaagatggctacactaagttccaattttgttgctgaattgcttctgtgagttcacttttcagttttaaggaagaataatatttgctacatatttcacaggggtttttatgaaggtaaatttaccagattaataaaaatttatgaatattaaaattatcattaataatataaaacacttatttgagattaaattaaatttttcatgagcccctctttggcaggaactctgtttaattctttgtatttatcccagctttttaaatggtggctgtaacataataaatgtttaataaatgcttatatgaatgg

SEQ ID NO: 111 - DNA, 571 bp, Homo sapiens
tttctaaagggctagttaccaactttatttctgtgtttctgtagaagaaacattttcagttcttcattgagtttgattatggaaatccattcaaagtcactatgaaaattttactcatgtagtttggaaatgcaacattttcctatcatgaaatctctttcagagaggagaatacaacatcttagtccagacatttaacatactgcatttcaagtacgtgtgtgtgtgttttattcaggttgtgtaatgctcccgtagaattatagaacaattaaatatggttagttccagagtgcaaattacagaaggaagctacttgtttaaaattccatacacgtttgcagttttttgtacacatttggatactttgaaagatgacagattgttaaatccattcaatggtaaagaaactcaccatttggagattgagtttacttgttaatgaatgactagcccaattatccttataaattgaatatggtgaccaaatgctttgatatcatactactctgcctttgtgggcacatatgtagacactactaaaaataaatatttttggagattaaaatgg

SEQ ID NO: 112 - DNA, 458 bp, Homo sapiens
gatgcatttgtaagtgaaggaatctattctgtggtgactgctttaatattaagagatggcttggcagagagtggtaagcagcttcattgtctaagatggaactagattctgtgggtagcaagtccattggtgccactcacaggaggcctcaaagaaaccaaactgccccacaaatctgcgggagtcttcattttcttccaacacagagatgtaaaatggaatattcttctgacgcagatatttcatgtatcgcaccatcactcgtgccatgttgcctgtccttcggtatttttccatgctggaggccattcctacttcacaagaagggtccatggttacccatgagaccgggactccctctgggccgagcatacaggctgctggcaggtcttctatgcagcgcttgatgtaatggcagctcctctcattcttccctcgctttcagttgtcatttacca

SEQ ID NO: 113 - DNA, 465 bp, Homo sapiens
ttcaaaagaaaattttaccagtggcccatgatggctgcaggtgggcacacggataataaaacctaggcttataagctactgctgacctcttgcctgcgtaactggagtttgttaaatatttcagtgacaggtactggttataaaactgcttatcagatccagaaagaagacaggatgaaatcagccaccttccaccaggccttaagatgcctcacctttctccctactcactcaattgcacacttactttattttatatatagcatcaccgagaacccagcagaatcagattgcatcagttgcttctctccctgcttttttcacctcctgggccacaggtatccccctgttatatatactgtgcccccacgtaacctcctgtgtgacacatcctgggatgttctgaggctgtatctgtaggattaagtccttaaacttggctcaaaataaatttagctgtgaatt

SEQ ID NO: 114 - DNA, 562 bp, Homo sapiens; identical to SEQ ID NO: 32

SEQ ID NO: 115 - DNA, 624 bp, Homo sapiens
cagggtgactcacagccgcattggtgactcacttcaatgtgtcatttccggctgctgtgtgtgagcagtggacacgtgaggggggggtgggtgagagagacaggcagctcggattcaactaccttagataatatttctgaaaacctaccagccagagggtagggcacaaagatggatgtaatgcactttgggaggccaaggcgggaggattgcttgagcccaggagttcaagaccagcctgggcaacataccaagacccccgtctctttaaaaatatatatattttaaatatacttaaatatatatttctaatatctttaaatatatatatatattttaaagaccaatttatgggagaattgcacacagatgtgaaatgaatgtaatttaatagaagcctaatcagcccaccatgttctccactgaaaaatcctctttctttggggtttttctttctttcttttttgattttgcactggacggtgacgtcagccatgtacaggatccacaggggtggtgtcaaatgctattgaaattgtgttgaattgtatactttttcacttttgataaataaacatgtaaaaatgtttcaaaaaaataataaaataaataaatacgaagaat

SEQ ID NO: 116 - DNA, 671 bp, Homo sapiens
aggtccttggcagaactcagttaaatctttgaagaatatttgtagttatcttagaagatagcatgggaggtgaggattccaaaaacattttatttttaaaatatcctgtgtaacacttggctcttggtacctgtgggttagcatcaagttctccccagggtagaattcaatcagagctccagtttgcatttggatgtgtaaattacagtaatcccatttcccaaacctaaaatctgtttttctcatcagactctgagtaactggttgctgtgtcataacttcatagatgcaggaggctcaggtgatctgtttgaggagagcaccctaggcagcctgcagggaataacatactggccgttctgacctgttgccagcagatacacaggacatggatgaaattcccgtttcctctagtttcttcctgtagtactcctcttttagatcctaagtctcttacaaaagctttgaatactgtgaaaatgttttacattccatttcatttgtgttgtttttttaactgcattttaccagatgttttgatgttatcgcttatgttaatagtaattcccgtatgtgttcattttattttcatgctttttcagccatgtatcaatattcacttgactaaaatcactcaattccaacttttttgtacaaagttgtccccccaa

SEQ ID NO: 117 - DNA, 666 bp, Homo sapiens
ttttttttcccccaaagacagggtcttgatcagagctcactgcaatatcaaactcctgggttcaagtgatcctcctgtctcagcctctggagtagctgggattataggcatgcaccaccatgcctggctactttttgtagagaaaaaaatttaaaaaggtctcactatgtggcccagagtgttcttgaattcctggcctcaagcaatcttcctgcctcagtttcccaaagcactgagattacaggcatgagccaccatgcccagccaaaactttacttttttacacttgcttttctggaatcaggatctaaacatattgcatgcggttgatatattaagcctgttttattttttattttttcttctttcttaagcctctttattatagttccccctacattttggttcacatgccactgttatgttgaagaaactgggtcctttgtcttctggataccgttttacaaacatacttgttttcatttaataaatggctaaatttctttctatgtcaataattatacacatcattattttaaatcaccacatcccattgtgtggatagactatcatttataaagcaaattgcagtattttgagtgtttggatagtttacagagttttgctttaataataaagttgcaatgacaacccttgttgcatcaa

SEQ ID NO: 118 - DNA, 602 bp, Homo sapiens
ccgtaagtagaccctagctagcatccccgagaaaccaccatgggtgaaggtcaaggtttgaggcccaaacagcattctaggaacgaacacaggtgtaaaaatgttaaggaaagataatatctctttacagttcaggaaattataatctcattgataaaataattagagaataaaatagagcagtatgtaataaatttttataaattttatagtacggatagtgacggcactgtcatgaaatctttggaaactgataatccattttattcagtaaaatgaaaggtgcatatatacatatgcattgagaaatgacaaaaccagccaggtgtgatggctcacacctgtcatcccaccaccttgggaagcagaggtgggaggatggcttgagcccgggagtttgagaccaatgtggccaacacagagagaccttgttctacaaaaataattttaaaaattagcctggtgtggtgtcaagcacctctagtcccagctactgagaggctgaaataggaggattgcttgatcccagaaggttgaagctgcagtgagctatgattgtaccactacactacagcctaggtgacaccgaaagacccttcctc

SEQ ID NO: 119 - DNA, 748 bp, Homo sapiens
gagcctattttacaagatggtgcaacaactgggcaaggcagaagccgctgccctcactgaaacagcaaaacaggtatacttcaaaagaaattatccacatattggtcacactgaccacatggttacaaacacttccaatggacagccctcgaccttaactattttcgagacagcactgtgaatccaaccaaaatgtcaagtccgttccgaaggcattttccactagtttttggactatgtaaaccacattgtacttttttttactttggcaacaaatatttatacatacaagatgctagttcatttgaatatttctcccaacttatccaaggatctccagctctaacaaaatggtttatttttatttaaatgtcaatagttgttttttaaaatccaaatcagaggtgcaggccaccagttaaatgccgtctatcaggttttgtgccttaagagactacagagtcaaagctcatttttaaaggagtaggacagagttgtcacaggtttttgttgttgtttttattgcccccaaaattacatgttaatttccatttatatcagggattctatttacttgaagactgtgaagttgccattttgtctcattgttttctttgacataactaggatccattatttcccctgaaggcttcttgttagaaaatagtacagttacaaccaataggaacaacaaaaagaaaaagtttgtgacattgtagtagggagtgtgtaccccttactccccatc

SEQ ID NO: 120 - DNA, 539 bp, Homo sapiens
tcagctctgatatcagtcccatcatactcagtattagtcataagtgacttcccgaaacactcattgcagcttggattctggcacaaacatgggatctctgaatggaagcaatgaattctggttttactggtgctgaggttatgctaatcagttttggggttttcagtctgtgtgagagatctctgattctaggtctctccaactgcttagccctgaatcttcttccaacctttgggaaaccacaggtccttcagggggtcatggtggagtagacacctaggatacaatttaggcatggccccactttcaaaaagggtcccaaatatgagattccagctgtatcaccaatgatatcacccattgaaactcaggcagaatgaagagaacacattcaccatcagttacatgctggcagaagtcaaccctgaatcaatgctttataattcctgtactgatcttgtgagtagaacaacagtattgcatggcatttttgtggttgtaagcatacatttataaaatacacagattttaaagccaac

SEQ ID NO: 121 - DNA, 543 bp, Homo sapiens
taagttctgtttgcttagtattgatgttatacttttgctttttcagtttcaaaatcatttagtatatctttttcctttcttttagcctttgtgtttttatttcagatgtgctttctttatgtactgactgtgatccccaaattcatatgttgaagtcccaactccaaatgtatttggaggtgggcctttcagacgtaattgagtttagatgacgtcatgagggtggagcccccatgatgacactaagtccttttaagaaaaggaagagagtctgagccctcctctacaccatgtgagggcacagagagagagcagccatcaacaagctgagagaggaggactgagaatgaaacctacctcgccagaaccttgtcatatcccttcccggtttccaaacgagtgagaaatcaatttctgttgtgtaagctactcagtgtatgaaactttgttatggcagccagagcagattaatgcatgcttcttggactttgtttttaactcaatatgaaaaacatatgttttaataaaaaaattaccccattc

SEQ ID NO: 122 - DNA, 272 bp, Homo sapiens
gaagcaagggttggaggcaatgtgggatctcagacccagtagctgcccttcctgcctgatgtgggagctgaaccacagaaatcacagtcaatggatccacaaggcctgaggagcagtgtggggggacagacaggaggtggatttggagaccgaagactgggatgcctgtcttgagtagacttggacccaaaaaatcatctcaccttgagcccacccccaccccattgtctaatctgtagaagctaataaataatcatccctccttgcctagc

SEQ ID NO: 123 - DNA, 189 bp, Artificial Sequence
  Description of Artificial Sequence: Synthetic polynucleotide
aaccgaagaagatggcccagctccccaagaaagcctcagccattcactgcccccagctcttctccccaggtgtgttggggccttggcctcccctgctgaaggtggggattgcccatccatctgcttacaattccctgctgtcgtcttagcaagaagtaaaatgagaaattttgttgatattctctcctt

SEQ ID NO: 124 - DNA, 211 bp, Homo sapiens
attttgctatagctgcaatgttcacagtaatccaagttccaatggcagggtggcagagtggaaccaaaagaggccaagttttgttggtgaagtataattattttttaagatcagggattcagaattgtagtatcagtgttcagttaggaagttcttatgatagtgcatggcacatgtcctttccatcatctgcattttctgctttttttgt

SEQ ID NO: 125 - DNA, 1830 bp, Homo sapiens
ggggtcggtgccgtcacttcctgctgtgtcatcttggtcaaatcagagctcttctctgcacctgcgttttccctgcctggcctcatccctgggttgtggtgtggacattgtgggtgtctccacaggagccccagggccacgaaagctggggtggcctctgccccttctggggttccttttcctgcacagctgctttctgactccacccacagctgggagcaggtgccggagccccggcctgcctggccctgtgaaggccactctgggcgtttgggtgggcgtgagtgccttcctctgctcccagcatgtggttttctccgttggccgcctcctggacctcctggtgcctgacatcccagagtctgtggagatcaaagtgaagcgggagtactacctggctaagcaggcactggctgagaatgaggtgaactgtacagcccagtctcggccctccccccagccctctccctatccttgtcagtggctgctctacctccggacactgagtcacatccctcttcctcttgctgcccttttttggggacaggttctttttggaacgaacggaacaaaggatgagcagcccgagggctcagaggcaagtctgggagcagccaggcccctgccccgtgcactccctgaggtcacagggccctgcccagccgcccactgtgcctcgtggccatggcctgctcctggccctagtctgacttgtccctgcccccaaccctctccccagctcagctcccactggacacccttcacggttcccaaggccagccagctgcagcagtgacgcctggaaggacatctggtggtccttaggggagtggcccctcctgagccctgcgagcagcgtccttttcctcttccctcaggcagcggctgtgtgaaccgctggctgctgttgtgcctcatctctgggcacattgcctgcttccccccagcgccggcttctctcctcagagcgcctgtcactccatccccggcagggagggaccgtcagctcacaaggccctctttgtttcctgctcccagacataagcccaaggggcccctgcacccaagggaccctgtccctcggtggcctccccaggcccctggacacgacagttctcctcaggcaggtgggctttgtggtcctcgccgcccctggccacatcgccctctcctcttacacctggtgaccttcgaatgtttcagagcgcagggccgttctccctcgtgtcctctggacccacccgccccttcctgccctgtttgcgcagggacatcacccacatgccccagctctcggaccctgcagctctgtgtcccaggccacagcaaaggtctgttgaacccctccctccattcccagttatctgggtcctctggattcttctgtttcttgaatcaggctctgctttccccctagccactacaggcagcctctgacagtgccgctttacttgcattctgcagcaattacatgtgtccttttgatccttgcccaacttccctccctctcccagctcctggcccctggcccagggcccctcttgctgtttttacctttgttccttggggcctagtacccagcaagcacccaaatgggggaggttttgggatgagaggaggaaacgtgtatacctgtaacatctggtggctcttcccccagaagtttgtgttcatacataattgttttccacgctggatcataatgtgacgtgcagttctgccctgtgctggggagccacatgaagcttcccctggctaacttgctaccccgcagcaatcccagtgtggccgtctgcttgctaaaaaatggatctgtgctcatctgtaaaa

SEQ ID NO: 126 - DNA, 832 bp, Homo sapiens
ttctcccgggggcagggtggggagggagcctcgggtggggtgggagcgggggggacagtgccccgggaacccggtgggtcacacacacgcactgcgcctgtcagtagtggacatttaatccagtcggcttgttcttgcagcattcccgctcccttccctccatagccacgctccaaaccccagggtagccatggccgggtaaagcaagggccatttagattaggaaggtttttaagatccgcaatgtggagcagcagccactgcacaggaggaggtgacaaaccatttccaacagcaacacagccactaaaacacaaaaagggggattgggcggaaagtgagagccagcagcaaaaactacattttgcaacttgttggtgtggatctattggctgatctatgcctttcaactagaaaattctaatgattggcaagtcacgttgttttcaggtccagagtagtttctttctgtctgctttaaatggaaacagactcataccacacttacaattaaggtcaagcccagaaagtgataagtgcagggaggaaaagtgcaagtccattatgtaatagtgacagcaaagggaccaggggagaggcattgccttctctgcccacagtctttccgtgtgattgtctttgaatctgaatcagccagtctcagatgccccaaagtttcggttcctatgagcccggggcatgatctgatccccaagacatgtggaggggcagcctgtgcctgcctttgtgtcagaaaaaggaaaccacagtgagcctgagagagacggcgattttcgggctgagaaggcagtagttttcaaaacacatagtt

SEQ ID NO: 127 - DNA, 930 bp, Homo sapiens
ccagcatgcccaaccatagtgagaccccatctctacataaaataagaattataaaatgtaaagtgaatggaatgcattgaaatttgatcctgtagcaaagtcatcccttttgaattttgaccatttgtttaatgcttcttttccaagcatatttggaatattcggagataaaatgagcaagttactgccatcaggaaactcttatttttttaggagagaaaggggaaagacgtgtagttgtacccatatggtttgctttaatagagtggtataaatcaaatgttattggtatacaaaaggacaaattttgtcagccaagtgtatgggtatcttcaaagagcacaggtgccatctgttctgagctaatgacccattgaagaaggccacaccaaatttgggggaaaagcagcataaacaaatgccagagtattttccaggcaggttgtatttggagaatctcctaatgttgtatatttaatttgtcctttgtccaagaataatgcaatgaactaggcaactagttgaataaaaattgaaaccaagttcaaacaagcctattgaaaaatgggcaaaagactggaaaaacatggccaataagcgtaagaagagatgttcagcttgatcagtcatcaagaaactacaaatcaagaccacactgaggctgggtgtggtggctcatgcctgtaatcccagcactttgggaggctgaagtgggcaaatcacttggacaggagttcaagaccagcctgggcaacatggtgaaaccctgtctttactaaaaatacaaaaagttagctgggcatggtggtacacacctgtaatccctgttactcgggggctgaggcacaagaatcacttgaactctggagagagaggttgcagtgagccgacatcagccactgcactcaagactctcgatctctctctctc

SEQ ID NO: 128 - DNA, 443 bp, Homo sapiens
tcccttcagttccgtcgacgaggttgtgcaatccaccagtcttataaatacagtgacgctccagcctctggaagcctctgtcagctcagcctccaaaggagccagcgtctccccagttcctgaaatcctgggtgttgcctgccagtcgccatgagaacttcctaccttctgctgtttactctctgcttacttttgtctgagatggcctcaggtggtaactttctcacaggccttggccacagatctgatcattacaattgcgtcagcagtggagggcaatgtctctattctgcctgcccgatctttaccaaaattcaaggcacctgttacagagggaaggccaagtgctgcaagtgagctgggagtgaccagaagaaatgacgcagaagtgaaatgaactttttataagcattcttttaataaaggaaaattgcttttgaagt

SEQ ID NO: 129 - DNA, 4300 bp, Homo sapiens
agcgctgagctgcaggcgcggcgaaacttccctctacccgcccggcccgcggcgcgcaccgttggcgctggacgcttcctccttggaagcgcctctccctcagttatggagaaaacttgtatagatgcacttcctcttactatgaattcttcagaaaagcaagagactgtatgtatttttggaactggtgattttggaagatcactgggattgaaaatgctccagtgtggttattctgttgtttttggaagtcgaaacccccagaagaccaccctactgcccagtggtgcagaagtcttgagctattcagaagcagccaagaagtctggcatcataatcatagcaatccacagagagcattatgattttctcacagaattaactgaggttctcaatggaaaaatattggtagacatcagcaacaacctcaaaatcaatcaatatccagaatctaatgcagagtaccttgctcatttggtgccaggagcccacgtggtaaaagcatttaacaccatctcagcctgggctctccagtcaggagcactggatgcaagtcggcaggtgtttgtgtgtggaaatgacagcaaagccaagcaaagagtgatggatattgttcgtaatcttggacttactccaatggatcaaggatcactcatggcagccaaagaaattgaaaagtaccccctgcagctatttccaatgtggaggttccccttctatttgtctgctgtgctgtgtgtcttcttgtttttctattgtgttataagagacgtaatctacccttatgtttatgaaaagaaagataatacatttcgtatggctatttccattccaaatcgtatctttccaataacagcacttacactgcttgctttggtttacctccctggtgttattgctgccattctacaactgtaccgaggcacaaaataccgtcgattcccagactggcttgaccactggatgctttgccgaaagcagcttggcttggtagctctgggatttgccttccttcatgtcctctacacacttgtgattcctattcgatattatgtacgatggagattgggaaacttaaccgttacccaggcaatactcaagaaggagaatccatttagcacctcctcagcctggctcagtgattcatatgtggctttgggaatacttgggttttttctgtttgtactcttgggaatcacttctttgccatctgttagcaatgcagtcaactggagagagttccgatttgtccagtccaaactgggttatttgaccctgatcttgtgtacagcccacaccctggtgtacggtgggaagagattcctcagcccttcaaatctcagatggtatcttcctgcagcctacgtgttagggcttatcattccttgcactgtgctggtgatcaagtttgtcctaatcatgccatgtgtagacaacacccttacaaggatccgccagggctgggaaaggaactcaaaacactagaaaaagcattgaatggaaaatcaatatttaaaacaaagttcaatttagctggatttctgaactatggttttgaatgtttaaagaagaatgatgggtacagttaggaaagtttttttcttacaccgtgactgagggaaacattgcttgtctttgagaaattgactgacatactggaagagaacaccattttatctcaggttagtgaagaatcagtgcaggtccctgactcttattttcccagaggccatggagctgagattgagactagccttgtggtttcacactaaagagtttccttgttatgggcaacatgcatgacctaatgtcttgcaaaatccaatagaagtattgcagcttccttctctggctcaagggctgagttaagtgaaaggaaaaacagcacaatggtgaccactgataaaggctttattaggtatatctgaggaagtgggtcacatgaaatgtaaaaagggaatgaggtttttgttgttttttggaagtaaaggcaaacataaatattaccatgatgaattctagtgaaatgaccccttgactttgcttttcttaatacagatatttactgagaggaactatttttataacacaagaaaaatttacaattgattaaaagtatccatgtcttggatacatacgtatctatagagctggcatgtaattcttcctctataaagaataggtataggaaagactgaataaaaatggagggatatccccttggatttcacttgcattgtgcaataagcaaagaagggttgataaaagttcttgatcaaaaagttcaaagaaaccagaattttagacagcaagctaaataaatattgtaaaattgcactatattaggttaagtattatttaggtattataatatgctttgtaaattttatattccaaatattgctcaatatttttcatctattaaattaatttctagtgtaaataagtagcttctatatctgtcttagtctattataattgtaaggagtaaaattaaatgaatagtctgcaggtataaatttgaacaatgcatagatgatcgaaaattacggaaaatcatagggcagagaggtgtgaagattcatcattatgtgaaatttggatctttctcaaatccttgctgaaatttaggatggttctcactgtttttctgtgctgatagtaccctttccaaggtgaccttcagggggattaaccttcctagctcaagcaatgagctaaaaggagccttatgcatgatcttcccacatatcaaaataactaaaaggcactgagtttggcatttttctgcctgctctgctaagacctttttttttttttactttcattataacatattatacatgacattatacaaaaatgattaaaatatattaaaacaacatcaacaatccaggatatttttctataaaactttttaaaaataattgtatctatatattcaattttacatcctttttcaaaggctttgtttttctaaaggctttgttttcctttttattatttttttcttttttatttttttgagacagtcttgctctgtcgctcaggctggagtgcagtggcacgatctcagctcactgcaacctcctcctcccaggttcaagtgattcttgttcatcagcctcccgagtagctgggactacaggcatgtgccactatgcccagctaatttttgtacttttagtagagacagggtttcaccacattggtcaggctggtcttgaaatgctggcgtcaagtgatctgcctgcctccgcctcacaaagcactgggattacaggcatgaatctggccttacgtaatatattttcttaatggctgcataatatcacatcaaataggcatttttcaaacctctttccttattaaacatgtagactatatccattttttactaaaataaataacatttcagataatatctttgcactgataatgttgccaagccatttctaaagtgaccttatcaatttaattaccattggatgagggtgttgctttcatcgcaccattgtagattgtcttttttatttcaatttgcgtttatttataactggttgcaaaggtacacagaacacacgctccttcaacttatctttgataaacccaagcaaggatacaaaaagttggacgacattgagtagagtcatggtatacggtgctgaccctacagtatcagtggaaaagataaggaaaatgtcactactcacctatgttatgcaaaacagttaggtgtgctggggctggatactgctcttttacttgagcattggttgattaaagtttaggtaccatccaggctggtctagagaagtctttggagttaaccatgctctttttgttaaagaagagagtaatgtgtttatcctggctcatagtccgtcaccgaaaatagaaaatgccatccataggtaaaatgctgacctatagaaaaaaatgaactctacttttatagcctagtaaaaatgctctacctgagtagttaaaagcaattcatgaagcctgaagctaaagagcactctgatggttttggcataatagctgcatttccagacctgacctttggccccaaccacaagtgctccaagccccaccagctgaccaaagaaagcccaagttctccttctgtccttcccacaacctccctgctcccaaaactatgaaattaatttgaccatattaacacagctgactcctccagtttacttaaggtagaaagaatgagtttacaacagatgaaaataagtgctttgggcgaactgtattccttttaacagatccaaactattttacattt

SEQ ID NO: 130 - DNA, 2882 bp, Homo sapiens
attccagcctcattgtaacacacattctacgcctagcctggctttcttgctctccctcatctcattgtttcagcggaggccaaatctgaagtcctttccagggagtggctctgttcatcttattcgccagccaaagtaggaacagcgtaagaggagagagacacattcagcagccaaaggactcggtggaaagagcagaacaccatagacaatatgtcgctcttgggacccaaggtgctgctgtttcttgctgcattcatcatcacctctgactggatacccctgggggtcaatagtcaacgaggagacgatgtgactcaagcgactccagaaacattcacagaagatcctaatctggtgaatgatcccgctacagatgaaacagttttggctgttttggctgatattgcaccttccacagatgacttggcctccctcagtgaaaaaaataccactgcagagtgctgggatgagaaatttacctgcacaaggctctactctgtgcatcggccggttaaacaatgcattcatcagttatgcttcaccagtttacgacgtatgtacatcgtcaacaaggagatctgctctcgtcttgtctgtaaggaacacgaagctatgaaagatgagctttgccgtcagatggctggtctgccccctaggagactccgtcgctccaattacttccgacttcctccctgtgaaaatgtggatttgcagagacccaatggtctgtgatcattgaaaaagaggaaagaagaaaaaatgtatgggtgagaggaaggaggatctccttcttctccaaccattgacagctaacccttagacagtatttcttaaaccaatccttttgcaatgtccagcttttacccctactctctactttttcacccaaactgataacatttatctcattttctagcacttaaaatacaaagtctatattattgcataattttgctgcttctcaatatcatagacacagtgaatagatgatgactatatggcttatatacaaacattctatgtacaatttcaagggagactaaactttaggctaataatctttactattgaatctgtctgatatagatcttagggttgaagaagctatctttgtctatttgggctaaccatagaatttcatttattttcctcacaatattttcctagaccaactccccatcattcacgtgttcctctttactcttactttaactattttgctggcttgcccgaaaatttgcctggcaagtcttccttataagacacatcatggtaagttttgtagtcctgtaagattctgcaacacagtcaagaattatacaatcctactagcaatatataaggacccaaaatgtcttctgctaagctcagaggctggggctaaagcatgaggactatgccagctatagaacttggactcataattcgctatccaatttttcatgcagttgtctagtcgggaagtaaggttggaaactaagtctcatttactgattcgtttatgggtagtaccgggatgaacccaccaccacaaagcaaattagacaacttaatgtgaaatcataccattggttgacgtttccttgagttgctacttcgttcatcttcacaacttaacaagtgcacggtcgaattattgtgcaagtggcttttggatatcctgattggggcctaagaagggcattcagacttgaattttaataggcagacagaaagtttgcctaatagttaatacgaaagagtgaaagaaacacaatattcagacaacccacattcttatcctggctctagcagtaaccacgtagccttggataagccattttccttcattaggtcctggtttaatttcctcatctttaaaatgagaaggttaaatttatcttagtactgctgggcgcagtggctcatgcctgtaatctgagcactttgggaagctgaggcgggtggatcacttgaggtcagaaatttgagacgagcctggccaacatggtgaaaccccatctctactaaaaatacaaaaattagctgggcgtggtggcacgtgcctgtaatcccagctactcgggaggctgaggcaggagaatcaattgaacctgggaggcagaggttgcagtgagccgagatggcgccattgcactccagcctgggtgacaaaagcaaaagtccatcttaagaaatatatatatatattatatatattcttagttctaagatttcctttaattctatgattctctggatttaaatgcattattcatatttcttgaagcttagatacagtctaattcatagcaaccatatctgctttatcctaggtgagggtagcagtccacaatggaatagaagaaaatcccattataacaaatgacaaattatatatcatgaatccttctgtctgactaactcaataactttctataaaagccaatggaattcaaataggagctaggagacaacaagttatatatgacagtggaggttgtattccttttatattgctgagaaaactagttaaatgatcagattcttgctgttaagaaacaatttcgtttaatgggatctgtacaactgattttaaaaaaatgctacaaaaagccccaaagcatataatctctactccttacagtctctagaattaaatgtactcatttagacaacatattaaatgcatattttagccactttagagaaacctcataggcacagagtttccaagattaattttaagaatatcttcacgaacttgaccctcctactccacattgcaacatttccatcagacagcatttcaattccagtattatgtatattgcaaattaaacattttaaaatatttttttccaatttatttctcaaaataaaatgtcttttgttctggt

SEQ ID NO: 131 - DNA, 6718 bp, Homo sapiens
atgggcttcttgcccaagcttctcctcctggcctcattcttcccagcaggccaggcctcatggggcgtctccagtccccaggacgtgcagggtgtgaaggggtcttgcctgcttatcccctgcatcttcagcttccctgccgacgtggaggtgcccgacggcatcacggccatctggtactacgactactcgggccagcggcaggtggtgagccactcggcggaccccaagctggtggaggcccgcttccgcggccgcaccgagttcatggggaaccccgagcacagggtgtgcaacctgctgctgaaggacctgcagcccgaggactctggttcctacaacttccgcttcgagatcagtgaggtcaaccgctggtcagatgtgaaaggcaccttggtcacagtaacagaggagcccagggtgcccaccattgcctccccggtggagcttctcgagggcacagaggtggacttcaactgctccactccctacgtatgcctgcaggagcaggtcagactgcagtggcaaggccaggaccctgctcgctctgtcaccttcaacagccagaagtttgagcccaccggcgtcggccacctggagaccctccacatggccatgtcctggcaggaccacggccggatcctgcgctgccagctctccgtggccaatcacagggctcagagcgagattcacctccaagtgaagtatgcccccaagggtgtgaagatcctcctcagcccctcggggaggaacatccttccaggtgagctggtcacactcacctgccaggtgaacagcagctaccctgcagtcagttccattaagtggctcaaggatggggtacgcctccaaaccaagactggtgtgctgcacctgccccaggcagcctggagcgatgctggcgtctacacctgccaagctgagaacggcgtgggctctttggtctcaccccccatcagcctccacatcttcatggctgaggtccaggtgagcccagcaggtcccatcctggagaaccagacagtgacactagtctgcaacacacccaatgaggcacccagtgatctccgctacagctggtacaagaaccatgtcctgctggaggatgcccactcccataccctccggctgcacttggccactagggctgatactggcttctacttctgtgaggtgcagaacgtccatggcagcgagcgctcgggccctgtcagcgtggtagtcaaccacccgcctctcactccagtcctgacagccttcctggagacccaggcgggacttgtgggcatccttcactgctctgtggtcagtgagcccctggccacactggtgctgtcacatgggggtcatatcctggcctccacctccggggacagtgatcacagcccacgcttcagtggtacctctggtcccaactccctgcgcctggagatccgagacctggaggaaactgacagtggggagtacaagtgctcagccaccaactcccttggaaatgcaacctccaccctggacttccatgccaatgccgcccgtctcctcatcagcccggcagccgaggtggtggaaggacaggcagtgacactgagctgcagaagcggcctaagccccacacctgatgcccgcttctcctggtacctgaatggagccctgcttcacgagggtcccggcagcagcctcctgctccccgcggcctccagcactgacgccggctcataccactgccgggcccgggacggccacagtgccagtggcccctcttcgccagctgttctcactgtgctctacccccctcgacaaccaacattcaccaccaggctggaccttgatgccgctggggccggggctggacggcgaggcctccttttgtgccgtgtggacagcgacccccccgccaggctgcagctgctccacaaggaccgtgttgtggccacttccctgccatcagggggtggctgcagcacctgtgggggctgttccccacgcatgaaggtcaccaaagcccccaacttgctgcgtgtggagattcacaaccctttgctggaagaggagggcttgtacctctgtgaggccagcaatgccctgggcaacgcctccacctcagccaccttcaatggccaggccactgtcctggccattgcaccatcacacacacttcaggagggcacagaagccaacttgacttgcaacgtgagccgggaagctgctggcagccctgctaacttctcctggttccgaaatggggtgctgtgggcccagggtcccctggagaccgtgacactgctgcccgtggccagaactgatgctgccctttacgcctgccgcatcctgactgaggctggtgcccagctctccactcccgtgctcctgagtgtactctatcccccggaccgtccaaagctgtcagccctcctagacatgggccagggccacatggctctgttcatctgcactgtggacagccgccccctggccttgctggccttgttccatggggagcacctcctggccaccagcctgggtccccaggtcccatcccatggtcggttccaggctaaagctgaggccaactccctgaagttagaggtccgagaactgggccttggggactctggcagctaccgctgtgaggccacaaatgttcttggatcatccaacacctcactcttcttccaggtccgaggagcctgggtccaggtgtcaccatcacctgagctccaagagggccaggctgtggtcctgagctgccaggtacacacaggagtcccagaggggacctcatatcgttggtatcgggatggccagcccctccaggagtcgacctcggccacgctccgctttgcagccataactttgacacaagctggggcctatcattgccaagcccaggccccaggctcagccaccacgagcctagctgcacccatcagcctccacgtgtcctatgccccacgccacgtcacactcactaccctgatggacacaggccctggacgactgggcctcctcctgtgccgtgtggacagtgaccctccggcccagctgcggctgctccacggggatcgccttgtggcctccaccctacaaggtgtggggggacccgaaggcagctctcccaggctgcatgtggctgtggcccccaacacactgcgtctggagatccacggggctatgctggaggatgagggtgtctatatctgtgaggcctccaacaccctgggccaggcctcggcctcagctgacttcgacgctcaagctgtgaatgtgcaggtgtggcccggggctaccgtgcgggaggggcagctggtgaacctgacctgccttgtgtggaccactcacccggcccagctcacctacacatggtaccaggatgggcagcagcgcctggatgcccactccatccccctgcccaacgtcacagtcagggatgccacctcctaccgctgcggtgtgggcccccctggtcgggcaccccgcctctccagacctatcaccttggacgtcctctacgcgccccgcaacctgcgcctgacctacctcctggagagccatggcgggcagctggccctggtactgtgcactgtggacagccgcccgcccgcccagctggccctcagccacgccggtcgcctcttggcctcctcgacagcagcctctgtccccaacaccctgcgcctggagctgcgagggccacagcccagggatgagggtttctacagctgctctgcccgcagccctctgggccaggccaacacgtccctggagctgcggctggagggtgtgcgggtgatcctggctccggaggctgccgtgcctgaaggtgcccccatcacagtgacctgtgcggaccctgctgcccacgcacccacactctatacttggtaccacaacggtcgttggctgcaggagggtccagctgcctcactctcattcctggtggccacgcgggctcatgcaggcgcctactcttgccaggcccaggatgcccagggcacccgcagctcccgtcctgctgccctgcaagtcctctatgcccctcaggacgctgtcctgtcctccttccgggactccagggccagatccatggctgtgatacagtgcactgtggacagtgagccacctgctgagctggccctatctcatgatggcaaggtgctggccacgagcagcggggtccacagcttggcatcagggacaggccatgtccaggtggcccgaaacgccctacggctgcaggtgcaagatgtgcctgcaggtgatgacacctatgtttgcacagcccaaaacttgctgggctcaatcagcaccatcgggcggttgcaggtagaaggtgcacgcgtggtggcagagcctggcctggacgtgcctgagggcgctgccctgaacctcagctgccgcctcctgggtggccctgggcctgtgggcaactccacctttgcatggttctggaatgaccggcggctgcacgcggagcctgtgcccactctcgccttcacccacgtggctcgtgctcaagctgggatgtaccactgcctggctgagctccccactggggctgctgcctctgctccagtcatgctccgtgtgctctaccctcccaagacgcccaccatgatggtcttcgtggagcctgagggtggcctccggggcatcctggattgccgagtggacagcgagccgctcgccagcctgactctccaccttggcagtcgactggtggcctccagtcagccccagggtgctcctgcagagccacacatccatgtcctggcttcccccaatgccctgagggtggacatcgaggcgctgaggcccagcgaccaaggggaatacatctgttctgcctcaaatgtcctgggctctgcctctacctccacctactttggggtcagagccctgcaccgcctgcatcagttccagcagctgctctgggtcctgggactgctggtgggcctcctgctcctgctgttgggcctgggggcctgctacacctggagaaggaggcgtgtttgtaagcagagcatgggcgagaattcggtggagatggcttttcagaaagagaccacgcagctcattgatcctgatgcagccacatgtgagacctcaacctgtgccccacccctgggctgaccagtggtgttgcctgccctccggaggagaaagtggccagaatctgtgatgactccagcctatgaatgtgaatgaggcagtgttgagtcctgcccgcctctacgaaaacagctctgtgacatctgactttttatgacctggccccaagcctcttgcccccccaaaaatgggtggtgagaggtctgcccaggagggtgttgaccctggaggacactgaagagcactgagctgatctcgctctctcttctctggatctcctcccttctctccatttctccctcaaaggaagccctgccctttcacatccttctcctcgaaagtcaccctggactttggttggattgcagcatcctgcatcctcagaggctcaccaaggcattctgtattcaacagagtatcagtcagcctgctctaacaagagaccaaatacagtgacttcaacatgatagaattttatttttctctcccacgctagtctggctgttacgatggtttatgatgttggggctcaggatccttctatcttccttttctctatccctaaaatgatgcctttgattgtgaggctcaccatggccccgctttgtccacatgccctccagccagaagaaggaagagtggaggtagaagcacacccatgcccatggtggacgcaactcagaagctgcacaggacttttccactcacttcccattggctggagtattgtcacatggctactgcaagctacaagggagactgggaaatgtagtttttattttgagtccagaggacatttggaattggacttccaaaggactcccaactgtgagctcatccctgagacttttgacattgttgggaatgccaccagcaggccatgttttgtctcagtgcccatctactgagggccagggtgtgcccctggccattctggttgtgggcttcctggaagaggtgatcactctcacactaagactgaggaaataaaaaaggtttggtgttttcctagggagagagcatgccaggcagtggagttgcctaagcagacatccttgtgccagatttggcccctgaaagaagagatgccctcattcccaccaccaccccccctacccccagggactgggtactaccttactggcccttacaagagtggagggcagacacagatgttgtcagcatccttattcctgctccagatgcatctctgttcatgactgtgtgagctcctgtccttttcctggagaccctgtgtcgggctgttaaagagaatgagttaccaagaaggaatgacgtgcccctgcgaatcagggaccaacaggagagagctcttgagtgggctagtgactccccctgcagcctggtggagatggtgtgaggagcgaagagccctctgctctaggatttgggttgaaaaacagagagagaagtggggagttgccacaggagctaacacgctgggaggcagttgggggcgggtgaactttgtgtagccgaggccgcaccctccctcattccaggctcattcattttcatgctccattgccagactcttgctgggagcccgtccagaatgtcctcccaataaaactccatcctatgacgc

SEQ ID NO: 132 - DNA, 2603 bp, Homo sapiens
gcatttgtggcgctaaaaaaagggatgggcgtgggagattccaggacttgtgctcgctgaagatacaactgttagtccaagctcctgtatcagcagtgcttgcacctcataggtgatgatcatgagggggacaaggagcctctagacttaagagacaagttgccagcattctccagatggagtgtttccctccgcagcaccccctgctggtcagtttgacaagcaggtgaacagaagttctcaaatacacaatagtagattctatcaatcaagttgcataaagagttctgattcccagagatagcagattctgtcaaccacatttcataaagagttctgattctaagagagccatacacctgaaggagggatggaaagactaggagagcctgggatcctcagagatggagatctggatgtgaagagaaagagaaaaacaaaagtcaacagacagtactgtgaccaagtcagtgatggtgagatcagcagcatctctaggacccttctgattgacatgaagtcaccatcaagtaggcagaactcacagcaggagacctgtctctgatgctgctgagccactttgacaatcgttatatagaaatctgattggatgccgtgaaactggacatcagcaaaatgtcagaatgggactttctagcatttatcctcacacagaaacatcaatttaaacaactatctatgcatgaaaataccttcagaagagctaagaaaaccaggtgaaaggttacagaaatgttgtgtagcagagaaataagaaaagattaattgaagagcataggaagaacaatttttcatttcctgtgtcacccctcccacaacaccaggcagcagggcacagagagaggcaatctctgtgtcgaagaagaaaagtgaagtgagcactgaactttgccttggactccaacgcagagcctgcttcagtaaaatccagtaatgggtatgcgactattgcccgaaactccaggctagtacctgcacactaagccagaccagatcacacagcccaggctccaggcttgcctggtggacttggtttctgggtatatcctcatgccaggtctaccccagtgccttggatgtcagacagtctttgggaccaggccagccccagtgactccaggctccagactgctcccagaacaaggccggcctcgacaactccaggtttcaagccagccccaggaccaggctagctcctgcaactctagtcaccatgccagtgtccatatatccaacccctaatctggcccctgtggatacaggctcgaggactgcctagcacaaggctagcccctgtggtcgcagactccaagtccaccctaggttccagaccggcccagaactagattggctcacaccaatccaggattcaggcccaccccatttccaggttggcagccctagccctaggccttagtcaggtatctggcaagcatctgcagacccaggctccaggcctcccgaggcctaagccagtttctgccaccccactctccaggccagttcctatggtcccatcctccagcagacccagggtccaggcccatcacagttgactccagtattgggcaggtgcctacagacccagtatctagtactgcctctgtggacttaggttccagtccagttcctacagccctaggacccaagccaccctttgtggccctagtgtccatgcccacttctgaatatgttggttctaggacagatctcacacaaccagcctccaggccattccacaattcttggcccacccctgtggctacaagcaccagtctagcacctatggtctcaaactttagactggccccatctcaccacagccctaggccagcatcagactccaggctggtttttgtaacccagcatccaacaaactcagggcccagctgtgctctagcagacccagggtacaggccgacttcattagaccctgttgctaggctggccatcatggacaaagtctctaggaccatctctgaagactcaggctccaggtctgcccccgtctaccaagatcccaggcccatttctccagattccggctccagtcctgcaccagtaccaggccagtccccatggactcagatgccaggcttatcccagcagactcagacactatgctcattccaaaatctggccagcccctgcagacacaggctcaatgcacgcctcagagccatgttagcccctgtggacccatgctcagtccagcacctactgttaacaggctctgtacctgcccttatagaaattggctttacgttcatccccacatacccaatgaaaagatccaccccagttgatccaggcttcaggcccaactctacagacccaggaaacaggcctaccatctgctaacacaggcaccaggccagcctgcctgaggactttggcaacaagttcacctgcagaccacactagacaccctacaaagagttgctggatgactaggaaagggtttttccagataaagccggtatgcaagaactagaataagtttcttgtttttcaaatgtgcagacactaatgcactgcctaaaaatcaagatcaagaacaatcagagaaaaatgataccacc

SEQ ID NO: 133 - DNA, 866 bp, Homo sapiens
gcacgctggggagatggtccctgcgggaagactccgaggcagtctcctgcagctccttccggcgaatccggttcaggaagtaaaaccagccctgtgtagaggcaggcgagtggaaccacaggtgcttcccgtcctggtcacaaagtcagagtggctgggccaagtgtcctgagaagagtcacctcctgggatcccatcagcctggccatagcagaacacccagacaggggcccatccccgaggctcaactcaacgcatgcagccactgtagaaaagtctggaaagtagttcttcaaccgactagacatggtgagcccaaaacccagccatgacactcctaggcatctgccccagaggaatgaaagcatccatcccctgcaaactcatccttacacagcagcgtgactcaagacggccaaaggcggaaacaccccaaacgtccatcagtggacaaacgggcagatgcaatgcactgtctgtaccgtgggatgtcactcagccatatgaaggaaagactccagtgtggatgagccctggaaccacggtgctgcgtgatcccgtaacacatggccagaacagacacggcccggaacctgaggccgggaggatgcgtgcaggtggcggggagacagaggggcgatggcccagtttcttttgggctgaaaatggtctaaagttgactgtggtgatggctgtacaactttgaatatgctgaaaactcgaattacacacttcagttgggcgaactgtactccatgtgaattacctctcgatggttctctcctgggctcaggcgcttctcccaccttggcctcctgagtagctggaactaccattcatgtgcggaaataaaacaactcggtctc

SEQ ID NO: 134 - DNA, 1738 bp, Homo sapiens
atccaaccaaaatgtcaagtccgttccgaaggcattttccactagtttttggactatgtaaaccacattgtacttttttttactttggcaacaaatatttatacatacaagatgctagttcatttgaatatttctcccaacttatccaaggatctccagctctaacaaaatggtttatttttatttaaatgtcaatagttgttttttaaaatccaaatcagaggtgcaggccaccagttaaatgccgtctatcaggttttgtgccttaagagactacagagtcaaagctcatttttaaaggagtaggacaaagttgtcacaggtttttgttgttgtttttattgcccccaaaattacatgttaatttccatttatatcagggattctatttacttgaagactgtgaagttgccattttgtctcattgttttctttgacataactaggatccattatttcccctgaaggcttcttgttagaaaatagtacagttacaaccaataggaacaacaaaaagaaaaagtttgtgacattgtagtagggagtgtgtaccccttactccccatcaaaaaaaaaatggatacatggttaaaggatagaagggcaatattttatcatatgttctaaaagagaaggaagagaaaatactactttctcaaaatggaagcccttaaagggctttgatactgaaagacacaaatgtgaccgtccatcctcctttagagttgcatgacttggacacggtaactggtgcagttttagactcagcattgtgacacttaccaagaaggccaaacctctaaccgacattcctgaaatacgtggcattattcttttttggatttctcatttatggaaggctaaccctctgttgaccgtaagccttttggtttgggctatttaaaatcctttctaaattggcatgaataggctcttgctaacgggatgagacaaactgaaaattattgcaagcattgactataattatgcagtacgttctcaggatgcatccaggggttcatttttatggagctgtccaggttagtttactcctgaccactaatagcattgtcatttgggctttctgttgaatgaatcaacaaaccacaatacttcctgggaccttttgtactttatttgaactatgagtctttaatttttcctgatgatggtggctgtaatatgttgagttcagtttactaaaggttttactattatggtttgaagtggagtctcatgacctctcagaataaggtgtcacctccctgaaattgcatatatgtatatagacatgcacacgtgtgcatttgtttgtatacatatatttgtccttcgtatagcaagttttttgctcatcagcagagagcaacagatgttttattgagtgaagccttaaaaagcacacaccacacacagctaactgccaaaatacattgaccgtagtagctgttcaactcctagtacttagaaatacacgtatggttaatgttcagtccaacaaaccacacacagtaaatgtttattaatagtcatggttcgtattttaggtgactgaaattgcaacagtgatcataatgaggtttgttaaaacgatagctatattcaaaatgtctatatgtttatttggacttttgaggttaaagacagtcatataaacgtcctgtttctgttttaatgttatcatagaattttttaatgaaactaaattcaattgaaataaatgatagttttcatctcc

SEQ ID NO: 135 - DNA, 126 bp, Homo sapiens
gtatgtactatttattttttcctatgtatacatgcctatgagaaagtttagtttgtaaattaggcccactgagagatgaacaataatgaataataaaatagaacaattatagcactatattgtaat

SEQ ID NO: 136 - DNA, 470 bp, Homo sapiens
tccccagccagagaggtttccaaaacgtcaagacatcatagtatgcacaaagtaaaaaatataaacagtacaaaggccctgaacagagtcaccctgctgtatgagaaatctactggcctggctgaaggagaaagttgcttgggcagaacagtgaaaagctaaagcaggcttgttagttgtatgagtctgttttcacgctgctgataaagacatacctgagactgggcaatttacaaaagaagaggtttagtggacttacagttccatgtggctggggagacctcacaatcatgacagaaggcaaggaggagaaagtcacgtggatggcagcaggcaaagagagagcttgtgcaggcaaactcttatttttaaaagcatcagatatcgcgtgaaccccggggggcggagcctgcagtgagcctagatcgcgccactgcattccagcctgggcaacagcgagactccgtctc

SEQ ID NO: 137 - DNA, 631 bp, Homo sapiens
agctgctcatgaggattgctgctgagaagcatttgttcctcattatagaatttccttgttgagtggctttggtagttaccctgggcttccagcacttcaagaagatcactatcagcagagcaactccagttgaagccaattgctatcaggcagcagaaacttggccacagtttggctgggaatccatctgcttctggactggtcataaaatttgcccataaagcaactcatttctgctcctattgtgtttttagaaaagtcatagaaatgcatatcactattaccatcttgtaaatgaaaatgtgacctcctgccacagagtgcttttagaatgaatcctacattttgccatatgttaaataaggtgaacagtaaagaagatcttgaaaacacagcctttctctggccatgaacagctatgtatacttaagcttgtattttggaaggaaaacatatttactttacaaaaatcattgaggatacaaaccatttaaaagaagaccaatcaatgtatttatttgctcatttgttcattcattcaaaggacatttgctaaatgccctgatgtgccagaaacatggggacagagaatataagataaagagtccagctggaagcaaatgctaacagg

SEQ ID NO: 138 - DNA, 631 bp, Homo sapiens; identical to SEQ ID NO: 137

SEQ ID NO: 139 - DNA, 446 bp, Homo sapiens
tcagaaaacttgatggttgaatactgaggtgggtcttatctttgagccatatggtttggactgtttggattctgtttttccattttcttattcagactgtttaggactaatgagagaagttttgcttcctggatgagaccaagaatactgtggagagtcacatgtcactagcatttgttttcgtatctagtattatttttgaagaagagtctggaaaatgcactctggcaaaggttaccaagaatttaagcctttttgcggggggtggagggggggcgttgatatgtgcattataaattatcatttaagaaaccgtccaagaaaaatgccgcgtcgttacatgacctcgatctttctttctcccctgcaatcctacacggcaataaaataattagtgttttagttaagtcaaatttttgaatgtctatgttaaactaagttttagg

SEQ ID NO: 140 - DNA, 446 bp, Homo sapiens; identical to SEQ ID NO: 139

SEQ ID NO: 141 - DNA, 583 bp, Homo sapiens; identical to SEQ ID NO: 96

SEQ ID NO: 142 - DNA, 125 bp, Homo sapiens
ccaaaccctgtatgtactatttattttttcctatgtatacatgcctatgagaaagtttagtttgtaaattaggcacactgagagatgaacaataatgaataataaaatagaacaattatagcacc

SEQ ID NO: 143 - DNA, 617 bp, Artificial Sequence
  Description of Artificial Sequence: Synthetic polynucleotide
tctttggagaaaaatgcgagatttttcaaatgactttcagagcagtggaatccaaagtttcacttttggtactttttttggtgacatcttcaagtaataaaaatgtatgctacacagtaattgctttttcataaaatgtattattttgcatgattcggaaagcaatccatattcattataggacatttgaaaaatatagaaaagcacaaataaagatgaagagcacatgtaacccaccatccagaggtaaatattgtcaacacactggtgtttattctgttatttttgtgtgggtgtatagtaattggattgctctacacacacacattcataatctaacttgctcatttaactaataatacatcgcaaaatttttccatatccacaaataaccatctaatctacatgacaatcttcaatcgtggagtagtattccagcctatggatgccccataattaatcagttccttgttaaacatgtagattgttttgatgcttttgctagcatataatgctatgttaaagagttctatgcattcgtttctgagcacatgaatacttttttcctttgagttatttctaaagagaaatttctaaataaagggtatgcccctctt

SEQ ID NO: 144 - DNA, 409 bp, Homo sapiens
ttcagatgtcatccttgcctaatgccaccctaaactctatattaatatctataatctcctcccctcccctgcatattttatccatgattacaacccagtatttccttctcaaagtacacatgagtgtaaagatgacactccaggctggtgtggtggccagcactttgggatgccgaggtggacggatcacttgaggtcaggagttcgggaccggcctggccaacatggtgaaatcccgtctctactaaggatacaaaaattagctgggtgtggcgcacgcctgtaatcccagctacttgggagactgaggcaggagaatcgttagaacccagggggcagagattgcagtgagctgagatcgcaccacttcactccagcctgggcaacagagtgagactctgtctcaaag

SEQ ID NO: 145 - DNA, 546 bp, Homo sapiens
agtagccctaggcaggggccctcagaagcagccatcctcctccaagggcagggcaggtgcccagggccagaggggtgcatgtcagtcccagccctcctagctagcactgagaaggccctgggtttcccttttcctctgttcctgagacacaccaaactccttctgcttgacgggctattttttgagagatgtgggtcctttgatgtggtcgagtctatgctcccctgctaactctcagagctactgtgagttttctaatttccacctttgtgaaagtcccttctgtcccaacgtcaagggttgatacagtctggggagagcttttacatgcatttcagcctgaattgatgtcaagacatcaacagtctctcccttccgaacttccttttagtttcctgacaaaagcatcacctgtctttctccagaaatgaatcgttggggaccctacaggtagtactggctgtgcctgtgaatttgtgatcattgaagacaaaggagccagaaagatacttgtttaaacttacctaataaaaatgagagttggat

SEQ ID NO: 146 - DNA, 546 bp, Homo sapiens; identical to SEQ ID NO: 145

SEQ ID NO: 147 - DNA, 582 bp, Homo sapiens
gggatgaagcagctgttgctgcttggctgtctttcagaagcaagctgctcacattgatattggttggtgagcaaggccagtggtcattgatcgattgactagattttgaactggctctgggtggcttcttgttaccatggctacaggtcaattctttcctaagtttgagtcaactttaaacagaaattttctgttcaaaagttgccttccattaactatgttcaaaatgaaactttttaatatttcagaattgtggatttaaagttttggttatgatgacttggttaataatagctctcacggagatttttttttgatacatcgtcttaaccagaagagttctctgtataatttatttcttaaaaataattgttttgtgtttgttttgggtatttttagaagcttttgctcaagtcctaacataatctccagtaggagattttagtctgtcagttcatgtatgtatatgatagtcatattgtcatattgtctttttaaattcctttttatgttcacttttttctctgtacaataatagtgatgttgttatacatttttatctcattaaaaagtagttacaat

SEQ ID NO: 148 - DNA, 582 bp, Homo sapiens; identical to SEQ ID NO: 147

SEQ ID NO: 149 - DNA, 366 bp, Homo sapiens
gttttttcagatggaatcccgctctgtcactcaggctggagtgcagtggtgcattctcagctcactacaccctccacctcctgggttcaagcaattatctccctcagcctcctgagtagctgagattacaggtgcccaccaccacgcatggctaatttttttttcgtgttttttttttttagtagaggcggggtttcagcatcttggccaggctggtcttgaactcctgacctctcgtgatccatcgtccttggcctccgaatgtgctaggattacaggcatcagctaccacgcgtggcctcctattcccttttctttgtattcacgtgtgcaggcgacatggcacaggccaggtagaggccccgt

SEQ ID NO: 150 - DNA, 6718 bp, Homo sapiens; identical to SEQ ID NO: 131

SEQ ID NO: 151 - DNA, 587 bp, Homo sapiens; identical to SEQ ID NO: 3

SEQ ID NO: 152 - DNA, 491 bp, Homo sapiens
attttaagtgaatgatacaactcatagagttatctgccatcattggtaaaagttagatgataatcaaatgcaaattgaaattcaatttagaattattgactgtccttttaaatagtaacaaccttttcacagcaagttttatgaaagccaataaattggttcaatgatttcactgttcatttgttatatagtagtctttggtgcttggatgtaaaacgtaatagaaagatagaaaagggagagctaggaaatggactataaaaaccaatttctacatttaaattaagcttacaaataagaacttgacagctagcagaattggtttccattagacattactcccaggagctatattacatagtaaatgaatatttttcattatacatcctacatgacccattcataaatggctatttacaaagctgttttactactaacttaaaaaaataggaactttgaattaccctctgtgctacttttattttaaacat

SEQ ID NO: 153 - DNA, 491 bp, Homo sapiens; identical to SEQ ID NO: 152

SEQ ID NO: 154 - DNA, 609 bp, Homo sapiens
tgatggtgcacacagccgggagcaggtatagagagaggagatcagactggaatacactggcgatcacactgactggacacagtgggctggattgggggcagaagaaagggagagatgcagggaaagcctcttgtgtgaggatgatgggcttgacggtgggaagggcgaattttttttttttttttttttgagatggagtttcgattttgttgcccaggctggagtgcagtggcgcggtctcggctcactgccacctccgcctcctatgttcaggcgattctcctgcctcagcctcctgagtagctgggattgcaggcatgcaccaccacacctggctaattttttacttttggtggagatggggtttcaccatgttggtcagtctggtctcgagctcctgacctcaggtgatctgcccgcctcagcctcttaaagtgctggcattacaggtgtgagccaccacgcctggccagggaagggtgagttctattgtcaccactgtttctgctgctgctaccttctcaatctagaaggtggtccattccattcctccttttccagatgagagatctgaggccagagttcccaaactatactttaaagattttt

SEQ ID NO: 155 - DNA, 609 bp, Homo sapiens; identical to SEQ ID NO: 154

SEQ ID NO: 156 - DNA, 122 bp, Homo sapiens
ccaaaccctgtatgtactatttattttttcctatgtatccatgcctatgagaaagtttagtttgtaaattaggcacactgagagatgaacaataatgaataataaaatagaacaattatagc

SEQ ID NO: 157 - DNA, 553 bp, Artificial Sequence
  Description of Artificial Sequence: Synthetic polynucleotide
taaaacaaaacagtatacttaaattggaattacctttctcttttctatttaaagtaaacatctttctcaagtaatatttatacaggaacagtttttgtttatggtgacagttaaaaatcaagttgctcaaagagtagcctaacagattagggacaagcaaatgtaaataaataccaaaagtagaagagcaaataaagaatggaacgtatctttgagcataaacagggttgttgcataatacttgtagataaactgctccaactgttggacaaaataaagaggggattgtgccagaccttgtgttttttgattcgaactttgccaaggcctggaacgctgaagaataatacttttatttttcttttctttctaattttattttactttttatttttctttccaaaaagcattaagaggtttttgtttgtctgtttcctttatcctcttggtaaaattttagcatatttaacatataagatttaatgtttgggtgatacaaaaaacaagaaaaatcaggtgtgttattttactaaatattaaaaatatgaaaatt

SEQ ID NO: 158 - DNA, 553 bp, Homo sapiens; identical to SEQ ID NO: 157

SEQ ID NO: 159 - DNA, 649 bp, Homo sapiens
tttggaagtgggaaatataggggagaatccagtacatgtgactaaaggaatagggttaggtggtccttctctctgcttttttttaaaatcctcattctactgttcacaggtgttgtgtctttcagtggctgctggacagctgttcccttctgttttttcctaagggtatttgataaaatggtcactgactgccaccactggattcatgttccatagagggctgattatgtctgtgcctttagtgtaatctcaaatattttgaagattcagaaagtaaaaatataaattttgctaacctagacatggtaattggtggcaattaagaaaaatttaacttgccaagaagcatcgttttttgtggggttcttgaactacttagaaaaggagacaaagtactcataaatattactttaaatattgatcataacatatttctgtgctctccctatagctgtgagcccctgaagtctggctttcagaatataaatgtattcacgaccccgaactcgtgtcatgccttaaagaatcatcatagtcaactcttttaacagcattattttaaaatgttaaatgtcactttggggatgtcattaacgatcacacatatgtaattgctgtttttaatgaagaaagtgttttgacaatttgg

SEQ ID NO: 160 - DNA, 335 bp, Homo sapiens
ttattaatatggggtgtttagaatgggagcaacatctttaatataggaattatgggccaggtgcagtggcttatgcctataatcccagcacttctggaggcagagacaggtggatcgcttgagctcaggaattcaagaccagcttggtcaacatggcaagaccctgtctctacaaaaaaatacaaaaattagctgggcatgatggtatgtgcttgtggtcccagctacttgggaggctgaggtgggaggatcacttgagcccgagaggtcaaggctacagtgagctgtgattgcacagctatactccagcctggccaacagagcaagaccctctc

SEQ ID NO: 161 - DNA, 236 bp, Homo sapiens
cccaggagttcgataccagcctgggcaacatggagagacctggtctctatcaaaaatgaaaatattagccaggcacagtggcatgtgcctgtactcctagctacttgggaggtagaggtgggaggattgcttgaattcagaagtttgagactgctgagctctgatcggatctgagtgagctctgatcgctccactgtactccatccagcctgggcaacagagtgagactccatctc

SEQ ID NO: 162 - DNA, 438 bp, Homo sapiens
ttcgagaataaacaggatgtgcctgtagatcaatgaaaagaaagcccaactggagtagaggtggcctgttggaatggtcagtttaaagcagttaggaaaaaaaaaatacagaaatacctttaaatttttttgataaaataatattatattttccatttaaaataaatacgtgttttttaggccaggtgtggtggttcacgcctgtaatcccagcacttttggaggctgaggagggcggatcacctgaggtcgtgagttcaagaccagcctggccaacatggtgaaaccccatctctactgaaaacacaaaaattagctgggtgtggtggtgcacgcctgtaatcccatatactccagaggctgaggcatgagaatcacctcaactcgggagccgagatcgcaccactgcactccagcctaagcaacagaagactgttt

SEQ ID NO: 163 - DNA, 427 bp, Homo sapiens
ctgtttagctttctgaacttgtccaaaccagtgcttttctgggactcactttccttatctatgaaatggagaggttagtttagataacctctaagatccagctttaaaattcttgactgaaggcctaacctttagaaatatctcgttagaggccagacgcggtggctcacgcctataatcccagtactttgggaggccaaggcaggctgatcacgaggtcaagagattgagaccatcctggccaacatgatgaaaccccgtttttactaaaaatacaaaattatctgggcatggtggcacacgcctgtaatcccagctactcgagaggccgaggcaggagggtggcttgaactcgggaggcagaggttgcagtgagacaagattgtgccactgcgctccagcctgggcaaaaagagcaaaactctgt

SEQ ID NO: 164 - DNA, 456 bp, Homo sapiens
  modified_base (48)..(48): a, c, g, or t
  modified_base (51)..(51): a, c, g, or t
  modified_base (53)..(53): a, c, g, or t
  modified_base (55)..(60): a, c, g, or t
tgcctctcctcccactaatgagcatcttttgtgaatatttaccttatnatncngnnnnnngctggtacctgggcccgatttggggtctggatgctgattggctttgctatctacttcggctatgggatccagcacagcctggaagagattaagagtaaccaaccctcacgcaagtctagagccaaaactgtagaccttgatcccggcactctctatgtccactcagtttgacatcgtcacacctaaatgctgtctggtcccctgcacaataatggagagtactcctgaccccagtgacagctagccctcccctgtgatggtggtggtggatactaatacagttctgtacgatgtgaaggatgtgtctttgctatttcttgtctattttaacccgtctgcttctaaatgatgtctagctgcttaccaactttaaaaaatgatattaaaagaaagtag

SEQ ID NO: 165 - DNA, 1216 bp, Homo sapiens
gaattcggcacgaggcctcgtgccggggagcaacctcagcttctagtatccagactccagcgccgccccgggcgcggaccccaaccccgacccagagcttctccagcggcggcgcagcgagcagggctccccgccttaacttcctccgcggggcccagccaccttcgggagtccgggttgcccacctgcaaactctccgccttctgcacctgccacccctgagccagcgcgggcgcccgagcgagtcatggccaacgcggggctgcagctgttgggcttcattctcgccttcctgggatggatcggcgccatcgtcagcactgccctgccccagtggaggatttactcctatgccggcgacaacatcgtgaccgcccaggccatgtacgaggggctgtggatgtcctgcgtgtcgcagagcaccgggcagatccagtgcaaagtctttgactccttgctgaatctgagcagcacattgcaagcaacccgtgccttgatggtggttggcatcctcctgggagtgatagcaatctttgtggccaccgttggcatgaagtgtatgaagtgcttggaagacgatgaggtgcagaagatgaggatggctgtcattgggggcgcgatatttcttcttgcaggtctggctattttagttgccacagcatggtatggcaatagaatcgttcaagaattctatgaccctatgaccccagtcaatgccaggtacgaatttggtcaggctctcttcactggctgggctgctgcttctctctgccttctgggaggtgccctactttgctgttcctgtccccgaaaaacaacctcttacccaacaccaaggccctatccaaaacctgcaccttccagcgggaaagactacgtgtgacacagaggcaaaaggagaaaatcatgttgaaacaaaccgaaaatggacattgagatactatcattaacattaggaccttagaattttgggtattgtaatctaaagtatgttattacaaaacaaacaaacaaacaaaaaacccatgtgttaaaatactcagtgctaaacatggcttaatcttattttatcttctttcctcaatataggagggaagatttttccatttgtattactgcttcccattgagtaatcatactcaaatgggggaaggggtgctccttaaatatatatagatatgtatatatacatgtttttctattaaaaatagccagt

SEQ ID NO: 166 - DNA, 2506 bp, Artificial Sequence
  Description of Artificial Sequence: Synthetic polynucleotide
cagcggcggcccaggaggcagccggtgagcgcctgcgagcagagtggcgggggccgctgacaggtcccgcgcagcccagcccagcccagccacgcggctcacaggtggggtccaagagcagtttggagcaacccggcgctacggagaggggtggacggctctgcacgggcctcctgtctcccgctcgggcagagggactcggggggacctcgctccttggccgagagaacctgaactcgggcggagagaacgcgcccaggcgggcaaggggaccagagaaagccggggctggaagtcactgtcgctcgccactgtctggagcgcacggagcgcagaggcccggcagccgcgcgtgccctcccggggaccgagccagtgatgcaggatcgctgagcggagatccgcgccgagaagtctctcggggccggggctgagacgcacgccttcgacaccgctgccaagaccccgattccggcgactcttgcggggaaccgaggggccaaggctgccccaagctcaggacttgggcgagtctaagacgatggtttcttaagcacggacccgcgttccccttcccgccccctcgactggaggcagggatcctgcgcggggcccccgggattccgtttccccgcggagccccggccgctgcctcccgggacagttcgcacggccacaggggcgcacggcgatgtggcctccgtccagcgcgctggcccgccggggggatgctctggcacctgtcggggtccaggcctagcatggccggcgcgttgcccgacgtcgcctccggctaggatggcccctccgggcccggccagtgccctctccacctcggccgagccgctgtcccgcagcatcttccggaagttcttgctgatgctctgctccctgctcacgtccctttacgtcttctactgcctggccgagcgctgccagaccctgtccggccccgtcgtggggctgtccggcggcggcgaggaggcgggggcccctggtggcggcgtcctggccggaggcccgagggagctggcggtgtggccggcggcggcacagagaaagcgcctcctgcaactgccgcagtggcggaggcgccggccgcccgcgccccgcgacgacggcgaggaggcggcctgggaagaagagtcccctggcctgtcagggggtccgggcggctccggggccggaagcaccgtggccgaggccccgccggggaccctggcgctgctcctggacgaaggcagcaagcagctgccgcaggccatcatcatcggagtgaagaagggcggcacgcgggcgctgctggagttcctgcgcgtgcaccccgacgtgcgcgccgtgggcgccgagccccacttcttcgaccgcagctacgacaagggcctcgcctggtaccgggacctgatgcccagaaccctggacgggcagatcaccatggagaagacgcccagttacttcgtcacgcgggaggcccccgcgcgcatctcggccatgtccaaggacaccaagctcatcgtggtggtgcgggacccggtgaccagggccatctcggactacacgcagacgctgtccaagcggcccgacatccccaccttcgagagcttgacgttcaaaaacaggacagcgggcctcatcgacacgtcgtggagcgccatccagatcggcatctacgccaagcacctggagcactggctgcgccacttccccatccgccagatgctcttcgtgagcggcgagcggctcatcagcgacccggccggggagctgggccgcgtgcaagacttcctgggcctcaagaggatcatcacggacaagcacttctacttcaacaagaccaagggcttcccctgcctgaagaaggcggagggcagcagccggccccattgcctgggcaagaccaagggcaggacccatcctgagatcgaccgcgaggtggtgcgcaggctgcgcgagttctaccggcctttcaacctcaagttctaccagatgaccgggcacgactttggctgggatggataaccatataatttaaaaagaaaaaaaaaatcaaaatataatatatttttttaccaatcggtagagaagagacagtttaatatttgtgctgaaaatatgtttcagtatttttttcaatgaatgttaagagattgttctcactcccgccccatcttaatgtataaccaacaccaaacacgtggatcaacagaaaaggaaaatttcactcgtctaaacactttcaattttcagtttttattttatgttctatatacccagtcataaagtataagcatcagttgtcattaaaagttttcagaaaatcttgaggttaaacatctctctctctttttttaaaatacaaggccctgataaaattgatatctatccttatatttttctccctttttcccgtgccactttttcttaaattatttcccagttagtattatcatatgtttgtacccgtcacagttttcatagtgctttcaaatacacctttttgatcatt

SEQ ID NO: 167 - DNA, 2506 bp, Homo sapiens; identical to SEQ ID NO: 166

SEQ ID NO: 168 - DNA, 2396 bp, Homo sapiens
caggagaagaggacaaagatactcagagagaaaaagtaaaagaccgaagaaggaggctggagagaccaggatccttccagctgaacaaagtcagccacaaagcagactagccagccggctacaattggagtcagagtcccaaagacatgggcttgttagagtgctgtgcaagatgtctggtaggggccccctttgcttccctggtggccactggattgtgtttctttggggtggcactgttctgtggctgtggacatgaagccctcactggcacagaaaagctaattgagacctatttctccaaaaactaccaagactatgagtatctcatcaatgtgatccatgccttccagtatgtcatctatggaactgcctctttcttcttcctttatggggccctcctgctggctgagggcttctacaccaccggcgcagtcaggcagatctttggcgactacaagaccaccatctgcggcaagggcctgagcgcaacgtttgtgggcatcacctatgccctgaccgttgtgtggctcctggtgtttgcctgctctgctgtgcctgtgtacatttacttcaacacctggaccacctgccagtctattgccttccccagcaagacctctgccagtataggcagtctctgtgctgacgccagaatgtatggtgttctcccatggaatgctttccctggcaaggtttgtggctccaaccttctgtccatctgcaaaacagctgagttccaaatgaccttccacctgtttattgctgcatttgtgggggctgcagctacactggtttccctgctcaccttcatgattgctgccacttacaactttgccgtccttaaactcatgggccgaggcaccaagttctgatcccccgtagaaatccccctttctctaatagcgaggctctaaccacacagcctacaatgctgcgtctcccatcttaactctttgcctttgccaccaactggccctcttcttacttgatgagtgtaacaagaaaggagagtcttgcagtgattaaggtctctctttggactctcccctcttatgtacctcttttagtcattttgcttcatagctggttcctgctagaaatgggaaatgcctaagaagatgacttcccaactgcaagtcacaaaggaatggaggctctaattgaattttcaagcatctcctgaggatcagaaagtaatttcttctcaaagggtacttccactgatggaaacaaagtggaaggaaagatgctcaggtacagagaaggaatgtctttggtcctcttgccatctataggggccaaatatattctctttggtgtacaaaatggaattcattctggtctctctattaccactgaagatagaagaaaaaagaatgtcagaaaaacaataagagcgtttgcccaaatctgcctattgcagctgggagaagggggtcaaagcaaggatctttcacccacagaaagagagcactgaccccgatggcgatggactactgaagccctaactcagccaaccttacttacagcataagggagcgtagaatctgtgtagacgaagggggcatctggccttacacctcgttagggaagagaaacagggtgttgtcagcatcttctcactcccttctccttgataacagctaccatgacaaccctgtggtttccaaggagctgagaatagaaggaaactagcttacatgagaacagactggcctgaggagcagcagttgctggtggctaatggtgtaacctgagatggccctctggtagacacaggatagataactctttggatagcatgtctttttttctgttaattagttgtgtactctggcctctgtcatatcttcacaatggtgctcatttcatggggtattatccattcagtcatcgtaggtgatttgaaggtcttgatttgttttagaatgatgcacatttcatgtattccagtttgtttattacttatttggggttgcatcagaaatgtctggagaataattctttgattatgactgttttttaaactaggaaaattggacattaagcatcacaaatgatattaaaaattggctagttgaatctattgggattttctacaagtattctgcctttgcagaaacagatttggtgaatttgaatctcaatttgagtaatctgatcgttctttctagctaatggaaaatgattttacttagcaatgttatcttggtgtgttaagagttaggtttaacataaaggttattttctcctgatatagatcacataacagaatgcaccagtcatcagctattcagttggtaagcttccaggaaaaaggacaggcagaaagagtttgagacctgaatagctcccagatttcagtcttttcctgtttttgttaactttgggtt

SEQ ID NO: 169 - DNA, 2120 bp, Homo sapiens
  modified_base (399)..(431): a, c, g, or t
  modified_base (523)..(560): a, c, g, or t
  modified_base (1015)..(1061): a, c, g, or t
  modified_base (1132)..(1158): a, c, g, or t
  modified_base (1270)..(1270): a, c, g, or t
  modified_base (1275)..(1275): a, c, g, or t
  modified_base (1277)..(1277): a, c, g, or t
  modified_base (1286)..(1348): a, c, g, or t
  modified_base (1475)..(1491): a, c, g, or t
  modified_base (1587)..(1587): a, c, g, or t
  modified_base (1591)..(1592): a, c, g, or t
  modified_base (1601)..(1601): a, c, g, or t
  modified_base (1610)..(1610): a, c, g, or t
  modified_base (1618)..(1618): a, c, g, or t
  modified_base (1622)..(1622): a, c, g, or t
  modified_base (1634)..(1634): a, c, g, or t
  modified_base (1661)..(1661): a, c, g, or t
  modified_base (1672)..(1672): a, c, g, or t
  modified_base (1675)..(1675): a, c, g, or t
  modified_base (1690)..(1690): a, c, g, or t
  modified_base (1696)..(1696): a, c, g, or t
  modified_base (1719)..(2013): a, c, g, or t
atgtctgtggatcccctatccagcaaagctctaaagatcaagcgagagctgagcgagaacacgccgcacctgtcggacgaggcgctgatggggctgtcggtgcgcgagctgaaccggcatctgcgcgggctctccgccgaggaggtgacacggctcaagcagcggcgccgcacactcaaaaaccgtggctacgccgccagctgccgcgtgaagcgcgtgtgccagaaggaggagctgcagaagcagaagtcggagctggagcgcgaggtggacaagctggcgcgcgagaacgccgccatgcgcctggagctcgacgcgctgcgcggcaagtgcgaggcgctgcagggcttcgcgcgctccgtggccgccgcccgcgggcccgccacgctcgtggcgccnnnnnnnnnnnnnnnnnnnnnnnnnnnnnnnnngggctcggggtctggccccgcccacggcccggaccccgcccacggcccggcctcctgctcctagtgcccgcccccgccatgcctcagccacnnnnnnnnnnnnnnnnnnnnnnnnnnnnnnnnnnnnnncgccgcctctgtgcccaggtcccatttctctgcagcactggccccttggtgcacacacattcccttcgtgggccctgtcttcctcttgcagccccccaaactgggaccgaatgaccctgggaaggggaacttgggtaggttggggatggggcagaggtctggatctgggatcgcccttggctgaaagtttagcctttttagattgagagatacagagccggcttagagaacagctgttgggggagaagagggcacccctcatcttggaaactgctcttattgtgccaatatgccctccaaaccctcccaggattcaaagctaggtttggctgtctgtgacttacgggaccgtcctgctgagaaattgcactgaagagatgcccccacctctggttgggcctgggggtgcctggccttccgaaactaaaagagtgggtgggaagactagtgaaacnnnnnnnnnnnnnnnnnnnnnnnnnnnnnnnnnnnnnnnnnnnnnnnggttgtgttgggaccaaaacctgggtgtcctcactgctgccctgagtccagccatggttttcagggggacnnnnnnnnnnnnnnnnnnnnnnnnnnnggagggcctccctggcttgggagaccgctctctgcaagggagggggagagaagcagagggagagagaaggtgacacggatggaagagtgggaaggagctggcctggctcagncctangntgtccctgnnnnnnnnnnnnnnnnnnnnnnnnnnnnnnnnnnnnnnnnnnnnnnnnnnnnnnnnnnnnnnngggagacaaggagacagaccctgcagtcctactacagtctggagtggggtcctaagaagaagggtcccacctcaacccctgtcagtgtccactgtggggtgggggctgacccctgcctttgattgtnnnnnnnnnnnnnnnnnccagtctcagtccctcccccaacactgtccacactgcccctccccactgtttatttattgcacggatctaagttattctccccagccagagcccgngctnnctgctcccngggaaaagntggcgtantggncctgagctgggntttatattttatatctgcaaataaatnacattttatcntanatttagggaaagccngagagnaacaacaaaaaatgtttaagccnnnnnnnnnnnnnnnnnnnnnnnnnnnnnnnnnnnnnnnnnnnnnnnnnnnnnnnnnnnnnnnnnnnnnnnnnnnnnnnnnnnnnnnnnnnnnnnnnnnnnnnnnnnnnnnnnnnnnnnnnnnnnnnnnnnnnnnnnnnnnnnnnnnnnnnnnnnnnnnnnnnnnnnnnnnnnnnnnnnnnnnnnnnnnnnnnnnnnnnnnnnnnnnnnnnnnnnnnnnnnnnnnnnnnnnnnnnnnnnnnnnnnnnnnnnnnnnnnnnnnnnnnnnnnnnnnnnnnnnnnnnnnnnnnnnnnnntattgcccggctcctagaatttatttatttcctgacttacagcaagcgagttatcgtcttctgtattttgtagactttctaaataaagtcaaattctttctttttcc

SEQ ID NO: 170 - DNA, 2120 bp, Homo sapiens; identical to SEQ ID NO: 169
  modified_base (399)..(431): a, c, g, or t
  modified_base (523)..(560): a, c, g, or t
  modified_base (1015)..(1061): a, c, g, or t
  modified_base (1132)..(1158): a, c, g, or t
  modified_base (1270)..(1270): a, c, g, or t
  modified_base (1275)..(1275): a, c, g, or t
  modified_base (1277)..(1277): a, c, g, or t
  modified_base (1286)..(1348): a, c, g, or t
  modified_base (1475)..(1491): a, c, g, or t
  modified_base (1587)..(1587): a, c, g, or t
  modified_base (1591)..(1592): a, c, g, or t
  modified_base (1601)..(1601): a, c, g, or t
  modified_base (1610)..(1610): a, c, g, or t
  modified_base (1618)..(1618): a, c, g, or t
  modified_base (1622)..(1622): a, c, g, or t
  modified_base (1634)..(1634): a, c, g, or t
  modified_base (1661)..(1661): a, c, g, or t
  modified_base (1672)..(1672): a, c, g, or t
  modified_base (1675)..(1675): a, c, g, or t
  modified_base (1690)..(1690): a, c, g, or t
  modified_base (1696)..(1696): a, c, g, or t
  modified_base (1719)..(2013): a, c, g, or t

SEQ ID NO: 171 - DNA, 2872 bp, Homo sapiens
ggccggagccccagcatccctgcttgaggtccaggagcggagcccgcggccaccgccgcctgatcagcgcgaccccggcccgcgcccgccccgcccggcaagatgctgcccgtgtaccaggaggtgaagcccaacccgctgcaggacgcgaacctctgctcacgcgtgttcttctggtggctcaatcccttgtttaaaattggccataaacggagattagaggaagatgatatgtattcagtgctgccagaagaccgctcacagcaccttggagaggagttgcaagggttctgggataaagaagttttaagagctgagaatgacgcacagaagccttctttaacaagagcaatcataaagtgttactggaaatcttatttagttttgggaatttttacgttaattgaggaaagtgccaaagtaatccagcccatatttttgggaaaaattattaattattttgaaaattatgatcccatggattctgtggctttgaacacagcgtacgcctatgccacggtgctgactttttgcacgctcattttggctatactgcatcacttatatttttatcacgttcagtgtgctgggatgaggttacgagtagccatgtgccatatgatttatcggaaggcacttcgtcttagtaacatggccatggggaagacaaccacaggccagatagtcaatctgctgtccaatgatgtgaacaagtttgatcaggtgacagtgttcttacacttcctgtgggcaggaccactgcaggcgatcgcagtgactgccctactctggatggagataggaatatcgtgccttgctgggatggcagttctaatcattctcctgcccttgcaaagctgttttgggaagttgttctcatcactgaggagtaaaactgcaactttcacggatgccaggatcaggaccatgaatgaagttataactggtataaggataataaaaatgtacgcctgggaaaagtcattttcaaatcttattaccaatttgagaaagaaggagatttccaagattctgagaagttcctgcctcagggggatgaatttggcttcgtttttcagtgcaagcaaaatcatcgtgtttgtgaccttcaccacctacgtgctcctcggcagtgtgatcacagccagccgcgtgttcgtggcagtgacgctgtatggggctgtgcggctgacggttaccctcttcttcccctcagccattgagagggtgtcagaggcaatcgtcagcatccgaagaatccagacctttttgctacttgatgagatatcacagcgcaaccgtcagctgccgtcagatggtaaaaagatggtgcatgtgcaggattttactgctttttgggataaggcatcagagaccccaactctacaaggcctttcctttactgtcagacctggcgaattgttagctgtggtcggccccgtgggagcagggaagtcatcactgttaagtgccgtgctcggggaattggccccaagtcacgggctggtcagcgtgcatggaagaattgcctatgtgtctcagcagccctgggtgttctcgggaactctgaggagtaatattttatttgggaagaaatacgaaaaggaacgatatgaaaaagtcataaaggcttgtgctctgaaaaaggatttacagctgttggaggatggtgatctgactgtgataggagatcggggaaccacgctgagtggagggcagaaagcacgggtaaaccttgcaagagcagtgtatcaagatgctgacatctatctcctggacgatcctctcagtgcagtagatgcggaagttagcagacacttgttcgaactgtgtatttgtcaaattttgcatgagaagatcacaattttagtgactcatcagttgcagtacctcaaagctgcaagtcagattctgatattgaaagatggtaaaatggtgcagaaggggacttacactgagttcctaaaatctggtatagattttggctcccttttaaagaaggataatgaggaaagtgaacaacctccagttccaggaactcccacactaaggaatcgtaccttctcagagtcttcggtttggtctcaacaatcttctagaccctccttgaaagatggtgctctggagagccaagatacagagaatgtcccagttacactatcagaggagaaccgttctgaaggaaaagttggttttcaggcctataagaattacttcagagctggtgctcactggattgtcttcattttccttattctcctaaacactgcagctcaggttgcctatgtgcttcaagattggtggctttcatactgggcaaacaaacaaagtatgctaaatgtcactgtaaatggaggaggaaatgtaaccgagaagctagatcttaactggtacttaggaatttattcaggtttaactgtagctaccgttctttttggcatagcaagatctctattggtattctacgtccttgttaactcttcacaaactttgcacaacaaaatgtttgagtcaattctgaaagctccggtattattctttgatagaaatccaataggaagaattttaaatcgtttctccaaagacattggacacttggatgatttgctgccgctgacgtttttagatttcatccagagatgggatctcgctgtgttgtcctggctggtctcaaactcctaggctcaagcaatcctcctccctcctcaagcaaacctcagtgctgggattataggcatgagccactgtacctggctaaatgttgtttttttgatattcaatttttgtttatagaattttcatttgttttgctcttatacttttcatctttttatgtttattgaccaattaaatatcatttgggtaagcacct

SEQ ID NO: 172 - DNA, 474 bp, Homo sapiens
  modified_base (82)..(82): a, c, g, or t
  modified_base (113)..(113): a, c, g, or t
  modified_base (150)..(150): a, c, g, or t
agcccttggtactttcctcttcataccacagtatggcttgtgattccaaggaaaaagttgtgtaataaccttacaagcagcnttcagttccttcctggtaaacctgtggtccngtggaacatgtgttttgatccagcagttcctctgccnacctggaatcttgagataagtgtgtgggtcagtgtgcatgtgtgcccatacatgcttatgaggaggtcagtgtgtgaggggaatcaggaagtctcttttttatttttaaatgaaatcaagtaaaacttaaccttggcttcaaaaatatctctcaaatactgtaaacaatacctttgatactttttagaaagagattatggccaggcgtagtggctcacgtctgtaatcccagaactttgggaggccgaggtgggcagaccacctgaactcaggaatttgagaccatcctgggcaacatggtgaaacccatctctactaaatacc

SEQ ID NO: 173 - DNA, 474 bp, Homo sapiens; identical to SEQ ID NO: 172
  modified_base (82)..(82): a, c, g, or t
  modified_base (113)..(113): a, c, g, or t
  modified_base (150)..(150): a, c, g, or t

SEQ ID NO: 174 - DNA, 1176 bp, Homo sapiens
  modified_base (155)..(155): a, c, g, or t
  modified_base (159)..(159): a, c, g, or t
  modified_base (513)..(513): a, c, g, or t
  modified_base (585)..(585): a, c, g, or t
  modified_base (649)..(649): a, c, g, or t
gtgaaccgaagtccttatattcccgggcttctttctcctctgggtaccagctccttactgccctgcagacaagcgtgccgtgcgtgcttgtggccaagggaaggaagagctggttgatccacagatagctccttcctccccgccccttccttttngttnggaggtcccaggatctgtgttcacagacatctgggggaagaaaaggagcaggaaactaccccgcacagagttaagcaggaaacaacaacaacatcatgcaaaaaccctgcaaagaaaacgaaggaaagccaaagtgcagcgtgccaaagagggaggaaaaacgcccgtatggagaatttgaacgccagcaaacagaagggaattttagacagaggctgcttcagtctctcgaagaatttaaagaggacatagactataggcattttaaagatgaagaaatgacaagggagggagatgagatggaaaggtgtttggaagagataaggggtctgagaaagaaatttagggctctgnattctaaccataggcattctcgggaccgtccttatcccatttaattaatttctctgacaattcaattatttnctgttattaatgttgccactgctttctgtttgtctgcactttcttgataaatatttgctatcgntttactccagtcattcgatgttgctgagatttacatatgactcttgtcaacatctcatcttttgacccaatcttattcatttaataagaggtctcattcatttgcatggaaaaatgctcattgtatattgcaaagtgaaaataacgagttgcaaaacagtgtatacatatatgtgtgtatatatgtacactttatttgtacatttctatgtgacataatgcaaaggaaagtgtctgattttattatacaccaaaggttaacagtgaatctctgtgtgatctctttttttttctttttgcctatctgcatcttctcacttgccaaaaaatgaatatatgtttatgtgtgtatattacttgtgtcacaaaaaaccctaaagtagacagtaaaagaacttgtcaatcgcctttggaaggcaatgaaacacttaataaactctcaataacagaagcgtaaaaatgaaatgtaaacctccaattacctctggatctcttagccagagtaataaactggtaattattacagat

SEQ ID NO: 175 - DNA, 1176 bp, Homo sapiens; identical to SEQ ID NO: 174
  modified_base (155)..(155): a, c, g, or t
  modified_base (159)..(159): a, c, g, or t
  modified_base (513)..(513): a, c, g, or t
  modified_base (585)..(585): a, c, g, or t
  modified_base (649)..(649): a, c, g, or t

SEQ ID NO: 176 - DNA, 462 bp, Homo sapiens
tatcggggatgacaaatgcttgtcacaaagagtagccttgttgattacacttataaatcttcgggagacttcttcaatgagtcagtgttagagctttcagtttccataaatgcagatttcctttactcagtttttttttaaacatgagctgatctttcttagtttgcactataataccctccactgaagtctcactgcaactgcttttaattatatgtgaagagaaactagccctttgctaaaatagttgcatgtttcacgggccagtgagtcatttagtcatacacttaagaactttccacctttcaagtgtttatcatcacctcggatttcacggcctaatgccagtcaatttcatggggcatagaagccctgtacgtattagtttgggccattattgtatcagtcttgtttattcccagaaaagtcttatcaagaaaagagggagtgactataatcaga

SEQ ID NO: 177 - DNA, 1804 bp, Homo sapiens
  modified_base (230)..(230): a, c, g, or t
  modified_base (240)..(240): a, c, g, or t
  modified_base (243)..(243): a, c, g, or t
  modified_base (296)..(296): a, c, g, or t
  modified_base (310)..(310): a, c, g, or t
  modified_base (312)..(316): a, c, g, or t
  modified_base (328)..(328): a, c, g, or t
  modified_base (348)..(348): a, c, g, or t
  modified_base (352)..(352): a, c, g, or t
  modified_base (360)..(360): a, c, g, or t
  modified_base (382)..(382): a, c, g, or t
  modified_base (402)..(402): a, c, g, or t
  modified_base (405)..(405): a, c, g, or t
  modified_base (413)..(414): a, c, g, or t
  modified_base (425)..(425): a, c, g, or t
  modified_base (441)..(441): a, c, g, or t
  modified_base (469)..(469): a, c, g, or t
  modified_base (471)..(471): a, c, g, or t
  modified_base (482)..(482): a, c, g, or t
  modified_base (485)..(485): a, c, g, or t
  modified_base (530)..(531): a, c, g, or t
  modified_base (657)..(657): a, c, g, or t
  modified_base (704)..(704): a, c, g, or t
caagggccccggcgccgggggcggcggggaaccccaaacgcaaccgggtctggagggatccccgcgccgagccagccgccgtcaccgcctccgcgccgcccctgcgggcttggcaggcgcccggcgcgcccgcactgcgcccggccgccggctcccgcggtcccaccgtgagctcgccggcccgtcgcccgctcgccatgcaaccgccgccggcctcgcgcgcgtaggcnccgccgcagncantgctgcccctgctcgccgcgctcctggccgccgcctgcccgctgccgcccgtncgcggcggggccgngnnnnncccggcctcctnggggtgccctccaatgcttnagtnaacgcgtnctccgcggacgagcccatcgcnccgcggctgctggcctcggnggnccccgggnnccccgagcgcncgggcccggaggaganggcggcggcagcggcgccgtgcaacatnancgtgcagcggncanatgctgagctcgctgctcgtgcgctggggccgcccgcggggcttnnagtgcgacctactgctcttctccaccaacgcgcacggccgcgctttcttcgccgccgccttccaccgcgtcgggccgccgctgctcatcgagcacctggggctggcggcgggcggcgcgcacaggnacctgcgcctctgcgtgggctgcggctgggtgcgcggtcgccgcacnggccgcctccggcccgccgccgcccccagcgccgccgccgccaccgccggggcgcccaccgcgctgccagcctaccccgcggccgagccgcccgggccgctgtggctgcagggcgagccgctgcatttctgctgcctagacttcagcctggaggagctgcagggcgagccgggctggcggctgaaccgtaagcccattgagtccacgctggtggcctgcttcatgaccctggtcatcgtggtgtggagcgtggccgccctcatctggccggtgcccatcatcgccggcttcctgcccaacggcatggaacagcgccggaccaccgccagcaccaccgcagccacccccgccgcagtgcccgcagggaccaccgcagccgccgccgccgccgccgctgccgccgccgccgcggccgtcacttcgggggtggcgaccaagtgacccgctccgctcctccctgtgtccgtcctgtgtccgcgcgcgcgggtgcctttcccgccggggactcggccggtgtgcttcgtgctgtagttatcgttagttcctcttcccgagatggggccgccgagagaccccagcgcctttgaaaagcaaggtttgtgctgcgcttccagttccgaaaagcagatgtttaagcccttggactgagggtgggatcgcagctccgaagacggagaggagggaaatggggccctttcccctctattgcatccccctgcccgactccttccccgcacccacgtgccctagattcatggcagaaaatgaccaaatcctgtgtatttgttttatatatttaataactgttttaaatgaaagttttagtaaaaaaaatacaaaacaaaaagattaaattgctattgctgtagtaagagaagctctttgtatctgaacatagttgtatttgaaatttgtggttttttaatttatttaaaattggggggagggcatgggaaggatttaacaccgatatattgttaccgctgaaaatgaactttatgaaccttttccaagttgatctatccagtgacgtggcctggtgggcgtttcttcttgtacttatgtggttttttggcttttaatacagacattttcctcca

SEQ ID NO: 178 - DNA, 2257 bp, Artificial Sequence
  Description of Artificial Sequence: Synthetic polynucleotide
  modified_base (2225)..(2225): a, c, g, or t
gcgcccgccccgcccggcaagatgctgcccgtgtaccaggaggtgaagcccaacccgctgcaggacgcgaacctctgctcacgcgtgttcttctgatggagtctcgctgtgtcacccaggctggagtgcagtggcgcagtctcagctcactgcagcctccacctcctgtgttcaagcagtcctcctgcctcagccaccagactagcaggtctcccccgcctctttcttggaaggacacttgccattggatttaggacccacttggataatccaggatgatgtcttcactccaacatcctcagtttaattccatgtgcaaatacccttttcccaaataacattcaattctttaccaggaaaggtggctcaatcccttgtttaaaattggccataaacggagattagaggaagatgatatgtattcagtgctgccagaagaccgctcacagcaccttggagaggagttgcaagggttctgggataaagaagttttaagagctgagaatgacgcacagaagccttctttaacaagagcaatcataaagtggtactggaaatcttatttagttttgggaatttttacgttaattgaggaaagtgccaaagtaatccagcccatatttttgggaaaaattattaattattttgaaaattatgatcccatggattctgtggctttgaacacagcgtacgcctatgccacggtgctgactttttgcacgctcattttggctatactgcatcacttatatttttatcacgttcagtgtgctgggatgaggttacgagtagccatgtgccatatgatttatcggaaggcacttcgtcttagtaacatggccatggggaagacaaccacaggccagatagtcaatctgctgtccaatgatgtgaacaagtttgatcaggtgacagtgttcttacacttcctgtgggcaggaccactgcaggcgatcgcagtgactgccctactctggatggagataggaatatcgtgccttgctgggatggcagttctaatcattctcctgcccttgcaaagctgttttgggaagttgttctcatcactgaggagtaaaactgcaactttcacggatgccaggatcaggaccatgaatgaagttataactggtataaggataataaaaatgtacgcctgggaaaagtcattttcaaatcttattaccaatttgagaaagaaggagatttccaagattctgagaagttcctgcctcagggggatgaatttggcttcatttttcagtgcaagcaaaatcatcgtgtttgtgaccttcaccacctacgtgctcctcggcagtgtgatcacagccagccgcgtgttcgtggcagtgacgctgtatggggctgtgcggctgacggttaccctcttcttcccctcagccattgagagggtgtcagaggcaatcgtcagcatccgaagaatccagacctttttgctacttgatgagatatcacagcgcaaccgtcagctgccgtcagatggtaaaaagatggtgcatgtgcaggattttactgctttttgggataaggcatcagagaccccaactctacaaggcctttcctttactgtcagacctggcgaattgttagctgtggtcggccccgtgggagcagggaagtcatcactgttaagtgccgtgctcggggaattggccccaagtcacgggctggtcagcgtgcatggaagaattgcctatgtgtctcagcagccctgggtgttctcgggaactctgaggagtaatattttatttgggaagaaatacgaaaaggaacgatatgaaaaagtcataaaggcttgtgctctgaaaaaggatttacagctgttggaggatggtgatctgactgtgataggagatcggggaaccacgctgagtggagggcagaaagcacgggtaaaccttgcaagagcagtgtatcaagatgctgacatctatctcctggacgatcctctcagtgcagtagatgcggaagttagcagacacttgttcgaactgtgtatttgtcaaattttgcatgagaagatcacaattttagtgactcatcagttgcagtacctcaaagctgcaagtcagattctgatattgaaagatggtaaaatggtgcagaaggggacttacactgagttcctaaaatctggtatagattttggctcccttttaaagaaggataatgaggaaagtgaacaacctccagttccaggaacntcccacactaaggaatcgtaccttctcagagt

SEQ ID NO: 179 - DNA, 415 bp, Homo sapiens
  modified_base (143)..(143): a, c, g, or t
  modified_base (278)..(278): a, c, g, or t
  modified_base (371)..(371): a, c, g, or t
  modified_base (376)..(377): a, c, g, or t
ggtccaagtgattctcctgcctcagcctcccaagtagctgggactacaggtgcccgccaccgcacccagctaccagaagaaaactttcacacagcctacctaagcttatgttcaagagtctctcttgaaatccaggaagaggntgatattccaagagtgatttaattgtgggatcctcctgaagcagatgaataggaacagctatttaaattgatgtaattttattatgacctccttcacagtggttttcaggtaaccctgctttcttagttaataangaggttctgtgacccaggtaaccttgatgcacagatgagataatgtggggattcactgatgcaaaatcagaggcaatcctttcataagtaganggtgnntctggccccagttgtttagatctcctttggccaaaaaa

SEQ ID NO: 180 - DNA, 4908 bp, Homo sapiens
acctgcgtgcagtcggtcctccaggccacgcagcgcccgagagtaccagggagactccggcccctgtcggcgccaagcccctccgcccctcacagcgcccaggtccgcggccgggccttgattttttggcggggaccgtcatggcgtcgcagccaaattcgtctgcgaagaagaaagaggagaaggggaagaacatccaggtggtggtgagatgcagaccatttaatttggcagagcggaaagctagcgcccattcaatagtagaatgtgatcctgtacgaaaagaagttagtgtacgaactggaggattggctgacaagagctcaaggaaaacatacacttttgatatggtgtttggagcatctactaaacagattgatgtttaccgaagtgttgtttgtccaattctggatgaagttattatgggctataattgcactatctttgcgtatggccaaactggcactggaaaaacttttacaatggaaggtgaaaggtcacctaatgaagagtatacctgggaagaggatcccttggctggtataattccacgtacccttcatcaaatttttgagaaacttactgataatggtactgaattttcagtcaaagtgtctctgttggagatctataatgaagagctttttgatcttcttaatccatcatctgatgtttctgagagactacagatgtttgatgatccccgtaacaagagaggagtgataattaaaggtttagaagaaattacagtacacaacaaggatgaagtctatcaaattttagaaaagggggcagcaaaaaggacaactgcagctactctgatgaatgcatactctagtcgttcccactcagttttctctgttacaatacatatgaaagaaactacgattgatggagaagagcttgttaaaatcggaaagttgaacttggttgatcttgcaggaagtgaaaacattggccgttctggagctgttgataagagagctcgggaagctggaaatataaatcaatccctgttgactttgggaagggtcattactgcccttgtagaaagaacacctcatgttccttatcgagaatctaaactaactagaatcctccaggattctcttggagggcgtacaagaacatctataattgcaacaatttctcctgcatctctcaatcttgaggaaactctgagtacattggaatatgctcatagagcaaagaacatattgaataagcctgaagtgaatcagaaactcaccaaaaaagctcttattaaggagtatacggaggagatagaacgtttaaaacgagatcttgctgcagcccgtgagaaaaatggagtgtatatttctgaagaaaattttagagtcatgagtggaaaattaactgttcaagaagagcagattgtagaattgattgaaaaaattggtgctgttgaggaggagctgaatagggttacagagttgtttatggataataaaaatgaacttgaccagtgtaaatctgacctgcaaaataaaacacaagaacttgaaaccactcaaaaacatttgcaagaaactaaattacaacttgttaaagaagaatatatcacatcagctttggaaagtactgaggagaaacttcatgatgctgccagcaagctgcttaacacagttgaagaaactacaaaagatgtatctggtctccattccaaactggatcgtaagaaggcagttgaccaacacaatgcagaagctcaggatatttttggcaaaaacctgaatagtctgtttaataatatggaagaattaattaaggatggcagctcaaagcaaaaggccatgctagaagtacataagaccttatttggtaatctgctgtcttccagtgtctctgcattagataccattactacagtagcacttggatctctcacatctattccagaaaatgtgtctactcatgtttctcagatttttaatatgatactaaaagaacaatcattagcagcagaaagtaaaactgtactacaggaattgattaatgtactcaagactgatcttctaagttcactggaaatgattttatccccaactgtggtgtctatactgaaaatcaatagtcaactaaagcatattttcaagacttcattgacagtggccgataagatagaagatcaaaaaaaggaactagatggctttctcagtatactgtgtaacaatctacatgaactacaagaaaataccatttgttccttggttgagtcacaaaagcaatgtggaaacctaactgaagacctgaagacaataaagcagacccattcccaggaactttgcaagttaatgaatctttggacagagagattctgtgctttggaggaaaagtgtgaaaatatacagaaaccacttagtagtgtccaggaaaatatacagcagaaatctaaggatatagtcaacaaaatgacttttcacagtcaaaaattttgtgctgattctgatggcttctcacaggaactcagaaattttaaccaagaaggtacaaaattggttgaagaatctgtgaaacactctgataaactcaatggcaacctggaaaaaatatctcaagagactgaacagagatgtgaatctctgaacacaagaacagtttatttttctgaacagtgggtatcttccttaaatgaaagggaacaggaacttcacaacttattggaggttgtaagccaatgttgtgaggcttcaagttcagacatcactgagaaatcagatggacgtaaggcagctcatgagaaacagcataacatttttcttgatcagatgactattgatgaagataaattgatagcacaaaatctagaacttaatgaaaccataaaaattggtttgactaagcttaattgctttctggaacaggatctgaaactggatatcccaacaggtacgacaccacagaggaaaagttatttatacccatcaacactggtaagaactgaaccacgtgaacatctccttgatcagctgaaaaggaaacagcctgagctgttaatgatgctaaactgttcagaaaacaacaaagaagagacaattccggatgtggatgtagaagaggcagttctggggcagtatactgaagaacctctaagtcaagagccatctgtagatgctggtgtggattgttcatcaattggcggggttccatttttccagcataaaaaatcacatggaaaagacaaagaaaacagaggcattaacacactggagaggtctaaagtggaagaaactacagagcacttggttacaaagagcagattacctctgcgagcccagatcaacctttaattcacttgggggttggcaattttatttttaaagaaaacttaaaaataaaacctgaaaccccagaacttgagccttgtgtatagattttaaaagaatatatatatcagccgggcgcggtggctcatgcctgtaatcccagcactttgggaggctgaggcgggtggattgcttgagcccaggagtttgagaccagcctggccaacgtggcaaaacctcgtctctgttaaaaattagccgggcgtggtggcacactcctgtaatcccagctactggggaggctgaggcacgagaatcacttgaacccaggaagcggggttgcagtgagccaaaggtacaccactacactccagcctgggcaacagagcaagactcggtctcaaaaacaaaatttaaaaaagatataaggcagtactgtaaattcagttgaattttgatatctacccatttttctgtcatccctatagttcactttgtattaaattgggtttcatttgggatttgcaatgtaaatacgtatttctagttttcatataaagtagttcttttataacaaatgaaaagtatttttcttgtatattattaagtaatgaatatataagaactgtactcttctcagcttgagcttaacataggtaaatatcaccaacatctgtccttagaaaggaccatctcatgttttttttcttgctatgacttgtgtattttcttgcatcctccctagacttccctatttcgctttctcctcggctcactttctccctttttatttttcaccaaaccatttgtagagctacaaaacctatcctttcttattttcagtagtcagaattttatctagaaatcttttaacacctttttagtggttatttctaaaatcactgtcaacaataaatctaaccctagttgtatccctcctttaagtatttaaaacttgttgccccaaatgtgaaagcatttaattcctttaagaggcctaactcattcaccctgacagagttcacaaaaagcccactttagagtatacattgctattatgggagaccacccagacatctgactaatggctctgtgccacactccaagacctgtgccttttagagaagctcacaatgatttaaggactgtttgaaacttccaattatgtctataatttatattcttttgtttacatgatgaaactttttgttgttgcttgtttgtatataatacaatgtgtacatgtatctttttctcgattcaaatcttaacccttaggactctggtatttttgatctggcaaccatatttctggaagttgagatgtttcagcttgaagaaccaaaacagaaggaatatgtacaaagaataaattttctgctcacgatgagtttagtgtgtaaagtttagagacatctgactttgatagctaaattaaaccaaaccctattgaagaattgaatatatgctacttcaagaaactaaattgatctcgtagaattatcttaataaaataatggctataatttctctgcaaaatcagatgtcagcataagcgatggataatacctaataaactgccctcagtaaatccatggttaataaatgtggtttctacatt

SEQ ID NO: 181 - DNA, 4908 bp, Homo sapiens; identical to SEQ ID NO: 180

SEQ ID NO: 182 - DNA, 1440 bp, Homo sapiens
gaattccccccccccccccctcacttggtgtgtctatatgtctggcagacattatcagcacattctctgttgttacctgtgattcattttttcttcactctccaggtgaatttcaattgctgaaaatttcccactgaaaatatgcagtaatatattttgtggttcagacatttggggcaaatggttcacattcattttagggttagtggtcatgctgtttatttttctctgctatacaaagttcctcttaggggtctgcctcatgacactaaaaaatgaatagagattctactgtaggttatctcctaggcttgagttcaacatttgtttggatttttgaagaaagtcaaatcaagcaatgctcccaaatgatgtctttgtaaattcataccctctggccctattttttttcatagaccctaactctacctttctgctttaaagcaaagtaaactcggtggcctcttcttctccacccctcaaaatgatagcaatctctgccgtcagcagtgcactcctgttctcccttctctgtgaagcaagtaccgtcgtcctactcaattccactgactcatccccgccaaccaataatttcactgatattgaagcagctctgaaagcacaattagattcagcggatatccccaaagccaggcggaagcgctacatttcgcagaatgacatgatcgccattcttgattatcataatcaagttcggggcaaagtgttcccaccggcagcaaatatggaatatatggtttgggatgaaaatcttgcaaaatcggcagaggcttgggcggctacttgcatttgggaccatggaccttcttacttactgagatttttgggccaaaatctatctgtacgcactggaagatatcgctctattctccagttggtcaagccatggtatgatgaagtgaaagattatgcttttccatatccccaggattgcaaccccagatgtcctatgagatgttttggtcccatgtgcacacattatacgcagatggtttgggccacttccaatcggataggatgcgcaattcatacttgccaaaacatgaatgtttggggatctgtgtggcgacgtgcagtttacttggtatgcaactatgccccaaagggcaattggattggagaagcaccatataaagtaggggtaccatgttcatcttgtcctccaagttatgggggatcttgtactgacaatctgtgttttccaggagttacgtcaaactacctgtactggtttaaataagtttaccttttcctccaggaaatataatgatttctgggaacatgggcatgtatatatatatatggagagagaattttgcacatattatacatattttgtgctaatcttgttttcctcttagtattcctttgtataaattagtgtttgtctagcatgtttgtttaatcctttgggaattc

SEQ ID NO: 183 - DNA, 990 bp, Homo sapiens
agccccaagcttaccacctgcacccggagagctgtgtcaccatgtgggtcccggttgtcttcctcaccctgtccgtgacgtggattggtgctgcacccctcatcctgtctcggattgtgggaggctgggagtgcgagaagcattcccaaccctggcaggtgcttgtggcctctcgtggcagggcagtctgcggcggtgttctggtgcacccccagtgggtcctcacagctgcccactgcatcaggaacaaaagcgtgatcttgctgggtcggcacagcctgtttcatcctgaagacacaggccaggtatttcaggtcagccacagcttcccacacccgctctacgatatgagcctcctgaagaatcgattcctcaggccaggtgatgactccagccacgacctcatgctgctccgcctgtcagagcctgccgagctcacggatgctgtgaaggtcatggacctgcccacccaggagccagcactggggaccacctgctacgcctcaggctggggcagcattgaaccagaggagttcttgaccccaaagaaacttcagtgtgtggacctccatgttatttccaatgacgtgtgtgcgcaagttcaccctcagaaggtgaccaagttcatgctgtgtgctggacgctggacagggggcaaaagcacctgctcgggtgattctgggggcccacttgtctgtaatggtgtgcttcaaggtatcacgtcatggggcagtgaaccatgtgccctgcccgaaaggccttccctgtacaccaaggtggtgcattaccggaagtggatcaaggacaccatcgtggccaacccctgagcacccctatcaaccccctattgtagtaaacttggaaccttggaaatgaccaggccaagactcaagcctccccagttctactgacctttgtccttaggtgtgaggtccagggttgctaggaaaagaaatcagcagacacaggtgtagaccagagtgtttctta

SEQ ID NO: 184 - DNA, 1798 bp, Homo sapiens
agacttgaacttgaatctcgaaccactgcatctccgactctgcccagactcttcactccgcggcaccctcaaaccccagcccaggccggggcgcacaagccagccagcgcacctgcagtcctcgcccggacgcgccgcgccccctcggaaccaggctctgctccgagcagccttcgcccctcaagccagccacagtccccgccaggccgggtgggcgtcaagatgaaggcggcccgcttcgtgctgcgcagcgctggctcgctcaacggcgccggcctggtgccccgagaggtggagcatttctcgcgctacagcccgtccccgctgtccatgaagcagctactggactttggttcagaaaatgcatgtgaaagaacttcttttgcatttttgcgacaagaattgcctgtgagactcgccaacattctgaaggaaattgatatcctcccgacccaattagtaaatacctcttcagtgcaattggttaaaagctggtatatacagagcctgatggatttggtggaattccatgagaaaagcccagatgaccagaaagcattatcagactttgtagatacactcatcaaagttcgaaatagacaccataatgtagtccctacaatggcacaaggaatcatagagtataaagatgcctgtacagttgacccagtcaccaatcaaaatcttcaatatttcttggatcgattttacatgaaccgtatttctactcggatgctgatgaaccagcacattcttatatttagtgactcacagacaggaaacccaagccacattggaagcattgatcctaactgtgatgtggtagcagtggtccaagatgcctttgagtgttcaaggatgctctgtgatcagtattatttatcatctccagaattaaagcttacacaagtgaatggaaaatttccagaccaaccaattcacatcgtgtatgttccttctcacctccatcatatgctctttgaactatttaagaatgcaatgcgggcaacagttgaacaccaggaaaatcagccttcccttacaccaatagaggttattgttgtcttgggaaaagaagaccttaccattaagatttcagacagaggaggtggtgttcccctgagaattattgaccgcctctttagttatacatactccactgcaccaacgcctgtgatggataattcccggaatgctcctttggctggttttggttacggcttgccaatttctcgtctgtatgcaaagtactttcaaggagatctgaatctctactctttatcaggatatggaacagatgctatcatctacttaaaggctttgtcttctgagtctatagaaaaacttccagtttttaacaagtcagccttcaaacattatcagatgagctctgaggctgatgactggtgtatcccaagcagggaaccaaagaacctggcaaaagaagtggccatgtgaagagggacactcaggacactttacgggatcaaagtgggtctacaccagtgctgcttcctgaatgtttgtgtgtgaacccttgtttcctccaaaacaaacgacagcaacgaaaactccttaatcagaacactgatccaatgaggaatggagcttgtttctgtgacccaggagaacttagtgcaagactacaggagttaacagatggccagctccttattttttaatgtagaataactcctgagtttatatcaaatcctgaagaaataagcctcagttttccatctgtttttgataagaataagaaagggagtgagtgtgaagatggtggttagcagtttcg

SEQ ID NO: 185 - DNA, 366 bp, Homo sapiens; identical to SEQ ID NO: 149

SEQ ID NO: 186 - DNA, 573 bp, Homo sapiens
gtttcttttggactgtcgttaatttttccctttaaaaacaggagctccttcatggtgacaaaggaaggaggaaatcatcccttctaacctactttgtcgtcttcattccaagaactctagaatggcacagcacgtttggttttgaaacctgtggaattttagtgctgtccattctcccaagtgtatgcctttagtgaaggtaaaaggaaagactgttttctgtgtcaagggaagattcatatgcaaatcccaagactcagatgttatttcagaagagttggtgtccatagtaaagtagaactggcccaggcttatctgcctgaaagggcaactgtttgaggtagagggaactggcagaataggagggggggaatcttcctgggagaaagtaaaaagaattctaggtggagaggagatcaagatgtgaaccaaacacatgtcttctaaattactataggaaatgttggaaaggactttagaacaaacaataaatatgtcataggaggaaaacaaagagaagtctttgggccagaaatagaaactgttaaaaacaaaacaacaacaacaaaacat

SEQ ID NO: 187 - DNA, 802 bp, Homo sapiens
  modified_base (284)..(284): a, c, g, or t
  modified_base (289)..(289): a, c, g, or t
  modified_base (305)..(305): a, c, g, or t
  modified_base (537)..(537): a, c, g, or t
  modified_base (573)..(573): a, c, g, or t
  modified_base (713)..(713): a, c, g, or t
  modified_base (748)..(748): a, c, g, or t
acagctgtgtttggctgcagggccaagagcgctgtcaagaagacccacacgcccccctccagcagctgaattcctgcagctcagcagccgccgccagagcaggacgaaccgccaatcgcaaggcacctctgagaacttcaggtaggagaaaagcaaactccctccaacctcttacttcgggcttaaggcagagaactcgcctccccagaatctcctccctccatgatcccccgctattcctctattttcttttcctcggacctgcagccttgggtcgaccctgnccctnaggggtgactgcaggnagagcagggaggatggtcaggcgtcaccaacaaccccatcacccagtaacaagaaccttgactctctcagtccctctgcatcaagacacttacccatttcccacctcatgcctgctaacttgaatgaaacaatcgctgggaaagcattaagagaattaaggctgggcactgtggctcatgcctgtaatcccagcactttgtgaggctgaggcaggcagataacttgagcccnaggagtttgagaccagcctgggcaacatggcaaaanccctgctctcccaaaaaaatacaaaaattagctgggcgtgctggtgtgcctgtattcccagctacttgggaggctgaggtgggaggattgcttcagctggggaggcggaggctgcagggagccaagactgagccattgcncccagcctgggtgacagagcaagaccctgtctctnaaaatgaatgaaaggaaggaagaaagagagagaaagagagagaggaaagaagga

SEQ ID NO: 188 - DNA, 1330 bp, Homo sapiens
  modified_base (114)..(114): a, c, g, or t
  modified_base (126)..(126): a, c, g, or t
  modified_base (885)..(885): a, c, g, or t
  modified_base (894)..(895): a, c, g, or t
tgccgccagggccaggaggggagcggcacctggaagatgcgcccattggctggtggcctgctcaaggtggtgttcgtggtcttcgcctccttgtgtgcctggtattcggggtanctgctcgcaganctcattccagatgcacccctgtccagtgctgcctatagcatccgcagcatcggggagaggcctgtcctcaaagctccagtccccaaaaggcaaaaatgtgaccactggactccctgcccatctgacacctatgcctacaggttactcagcggaggtggcagaagcaagtacgccaaaatctgctttgaggataacctacttatgggagaacagctgggaaatgttgccagaggaataaacattgccattgtcaactatgtaactgggaatgtgacagcaacacgatgttttgatatgtatgaaggcgataactctggaccgatgacaaagtttattcagagtgctgctccaaaatccctgctcttcatggtgacctatgacgacggaagcacaagactgaataacgatgccaagaatgccatagaagcacttggaagtaaagaaatcaggaacatgaaattcaggtctagctgggtatttattgcagcaaaaggcttggaactcccttccgaaattcagagagaaaagatcaaccactctgatgctaagaacaacagatattctggctggcctgcagagatccagatagaaggctgcatacccaaagaacgaagctgacactgcagggtcctgagtaaatgtgttctgtataaacaaatgcagctggaatcgctcaagaatcttatttttctaaatccaacagcccatatttgatgagtattttgggtttgttgtaaaccaatgaacatttgctagttngtatcaaannttggtacgcagtatttttataccagtattttatgtagtgaagatgtcaattagcaggaaactaaaatgaatggaaattcttaaagggaatgatgtgattcaagctggaaagagggttgggagaaacagcttgtccaggtggagctatgttatgatcagatcgaagtgtgacccctgtgtggtccagacagccctgcagagagaaaacctttattccattatcaccaagcacctcctagtttccgacagtcatctccttctgctgggagaattagcagcagttcagggggcttatgttatgtccttgttcaactcaacttgagctcttgaactcctcctgtgggcctgtgaatgtattcattcattccacaactctgggtgcctcccacgtctggcaccgggggtacagtacacattccctgccttcatgccaggc

SEQ ID NO: 189 - DNA, 472 bp, Homo sapiens
ctcctgtgaggatgaaattgaaaactccggtttctggcttggcgatcgggtgaccgagcagccgcgaggtgacagcgccggcggcccgcgggcggggaccggctgggatagaggcgcgttgttctctgagcgatgtttaccgagaagcccgctccgcggcacgggcgggtgtcagttgggaccccaaccctgggtcccgcggctcctagcccggggcctgcggtgtagacgggggttggggacaggcccagctggccctgaccgggtgtcgggcgcccagagatgccgcgcgggaggagccgcgggagagccgccggactcagcgagcagagggtcgtggagcctgatggatcgatgagatctgaaaaagaacactgtgcgagattgtattcctgcttattctttccaagttagtaggcagattggaactatagaatttatccgtgataataataaagttcgcataactttt

SEQ ID NO: 190 - DNA, 486 bp, Artificial Sequence
  Description of Artificial Sequence: Synthetic polynucleotide
  modified_base (34)..(34): a, c, g, or t
  modified_base (36)..(36): a, c, g, or t
  modified_base (76)..(85): a, c, g, or t
gcgatgcaaccaaggctgtgcgcccgccccgggnantacaggacgcaggaccccctcctccagaggtcctcagcannnnnnnnnnaagcacccccgcatagatcaattcattcattcaacaaatgaatatttgatggaagaggctccagatggagggaagagccagtgcaatgcctcaaaatggagacatggtgtattaatggagaagcagcaggacttgtgaaagcctgggacgagggcttggggttttattctcaatatgatagaaaatgattcaaggctgagagcaggagagtggcaggatatactgacttatttaaatctcactgtctcccacaaagaacaagttttatctctcctcatgctcctgagagaagaatgtactgcttatctaccatcatttctgcatccatcgaaacatctgggtttacctgaaaagaaattatataaaactttcagtgttttctaataaaaatgcaatgaata

SEQ ID NO: 191 - DNA, 1192 bp, Homo sapiens; identical to SEQ ID NO: 10

SEQ ID NO: 192 - DNA, 10888 bp, Homo sapiens
tcagattcatgaaccccatttgctaagaagatttgctcaggtagtcacctgtacccctgtgagccaagattgcaacagtacatgctaagagcagtaagaaggagtttgtaaagcttagaaagacctgacaggccaggcgctgtggctcacgcctgtaatctcgacacttcgggaggccgaggcaggcggatcaccaggtcaggagttcaagaccatcctgaccaatatggtgaaaccccgtctgtactaaacatataaaaattagcttgacgtggtggcccgcgcctgtagtccagcaactcgagaggctaaggtgaggcggaggttgcagtgagccgagatcgccactgcactccagcctggcggcagagcaagactccgtctcaaaaaaaaaaaaaaaaaaaaaaaaaaaaagacctgacaagtgaaagctactaatattgccattatcatttaaaaaaaaccccagacacaggtttttcagggagtttcatccaaccaggcaggtctcagaaatcagaaaagaaatggaaagggtaggaaatctggagtttgacaattctgagtttgaatttcttgtgatgggatcttgggcaagtcatttaacctccctgagtatcatttttttcttttataaaatgaagatttttctctcttaaccttccagagctgttttaaggattacaaatcttctactgaaaggcgtagcacaggagctgtgcttggcaagtgccaaatacaaggcattaattattattattagaattaataataatatcccctccctcttacacattctttgtctccgggtggattaaaaggtggaaggagaggctaccaacaccatcagaagagaggcttctctctaagtttcatttcccatctcctccaaatccgcatccctcccaaacgccggacctgtaaggccagcagggtccaagacacacatcctttgcccagcggggaagattaaagctaaagctcagagagggaaaacatttcctaagctcgcacagcgaatcaggacagaaaccaggacgagcctcggaatccctccattacctccactttcacctgagcatcacagcccgctcgggactcagtttccccacctacgtgaccacaccacactaatcagggtctccttttggagatctgctcttcttctcgaatgggggcgctgcaccatcggtagaacagggtaggtgggggcgccagaggtgaaggggacctgcaggctggggtcttccccgcccgggtcagcggggtccctgcggggctagtctaagcgcctattattaccagcccccggggcggcgttgcactgcgcaggcgcgggcggggcgcgggcgcgcgcgcgagcgagcgagggattccctctgacgtcattgctaggataccaaacaaacactccgccgcgccggccgagctccttatatggctaattgcgtcacaggaactccgggaaggcggggccgggatcccctcccgccgagtggcccggaacgcaacccccgagacccccagggccccgagggtcatgcaagtgaccagatcgagtctagaacagacctcttgctggacagtgcgggactcgatttggcggggccggagatttggggaagtttgtccagcaaggggcgggtgacgtaagcaggggggcgggtcccgggcatataaatacaggctggcgggtctgtgcttcattcataagactcagagctacggccacggcagggacacgcggaaccaagacttggaaacttgattgttgtggttcttcttgggggttatgaaatttcattaatcttttttttttccggggagaaagtttttggaaagattcttccagatatttcttcattttcttttggaggaccgacttactttttttggtcttctttattactcccctccccccgtgggacccgccggacgcgtggaggagaccgtagctgaagctgattctgtacagcgggacagcgctttctgcccctgggggagcaacccctccctcgcccctgggtcctacggagcctgcactttcaagaggtacagcggcatcctgtgggggcctgggcaccgcaggaagactgcacagaaactttgccattgttggaacgggacgttgctccttccccgagcttccccggacagcgtactttgaggactcgctcagctcaccggggactcccacggctcaccccggacttgcaccttacttccccaacccggccatagccttggcttcccggcgacctcagcgtggtcacaggggcccccctgtgcccagggaaatgtttcaggctttccccggagactacgactccggctcccggtgcagctcctcaccctctgccgagtctcaatatctgtcttcggtggactccttcggcagtccacccaccgccgccgcctcccaggtaagtttttgatagtaggggtgctgctttgtaggttttattttttaagtcaagggtgaaaagaataaaccccaacccccacaaaaaggcgcatcagaaccctagatctgagatggaaaaggctcacagcgcactttgcaaactgcaaagagtcgggagatgtttgcaattggttgcgtgcgtggagcgcaaggagggaacgcggcagggagggtaggctttggggcgaggtgggggtggggtgggtaatgcgctgctcaatgcaacgtgtatgcggtagcggggctgagaactttgagccggccccgggactgccccctgctcgggtcccagacctgaagctagcgcagttaggcaggtgggggaaatcccggggaagcttccagcagtctcttttcctttcctcctccttcggagcgcccacttcggtgccgggtcgccctccacccatcgggaagaggggcctcgaaccctcagccgcgctgcctccgcctcctgcgcggagacgtaacgggggacccgtgcgtaacggctgacgcgctggaatcctccgtctgacgcggggcacgcacggcgcgcggcgcccccttcgtccgccccgcccctgacgtcccgggagcgttctattttggaacgccggggccacgttgctaagggagggggcagcccggcgtttcgattggccgccggggcgcacgccttggccaatcagctttcccttcctatttgtagggtgcattttccttcccccctctctgtccccggaacccgtggttccttggcggctgggtctcttttcggcgcctctagaggcagagggaggggatccctgtcgtgacaagagcgcctgtctgcgacccaatggatctgcgaggcccttgcggggatctggtccctgggctctcaggagcagggggtgtctgcttgtgtgctggcgtttcttggagagatacggtggctgtcaccctcttctccaggcacacacagacacattcccactccctctgctcctcatgcccggttcctccggtgtgtcccaagacaggactagaaccgcgaaccgaagggcaaccagccaggtggtctccaggagctccgccccctctgggttcccaggactctgattggtcggcgagccagcccttccctcaccacgccccccgagagagtagttaagccttcagagcagttccaggagtccatttacgggaggggggagatgagcgctgctgaggcttgggggctcaggtcccgcaccattccccctccgcgacaatctgagagagctccagtggttacttttatctacctgtccgttcaccctaaactgtcactcgtcagtctcactctgagaagagacagtaacttgaaacgttgttctaaactcctaggcccgtcccccaaacacccttttgactgggacccccgcccctgcatgggacctcgcgcagaggggggtgtgtatgtgtgtgagtgtagaggaaggcttggcctaaggcctctccttctccctccccttgcctctggggtgggggtggggtgttgtggctgtgtgtgtggctgtggctccgtcccgggggttctgtcacccggctgtgtccagcctcctctccaccccccatacctaagagtcaccaacccggggtgtgattcaccacccgctggaaccgtgcaacctttccccgaggaagaaggaggaggtagaagccagttgagcagaaatcctctcattaaccactgcgtcacggtgtagtggaagggtgggtgttgtggctttttccctgtgacacacacatccacactcgctcaccctgtgctcactcacggggtcggtgtgtgttatgtgtgttgggtgtgtgtgtgtcggtgtctttgtttgtgtgtctacgcctgtgtgtgtatgtgtcaccccgtaggagtgcgccggtctcggggaaatgcccggttccttcgtgcccacggtcaccgcgatcacaaccagccaggacctccagtggcttgtgcaacccaccctcatctcttccatggcccagtcccaggggcagccactggcctcccagcccccggtcgtcgacccctacgacatgccgggaaccagctactccacaccaggcatgagtggctacagcagtggcggagcgagtggcagtggtgggccttccaccagcggaactaccagtgggcctgggcctgcccgcccagcccgagcccggcctaggagaccccgagaggagacggtgagtaagggacatcagaacttggcctgggtagggggaagcaagagaggcaggaagtttcttatgaatggaggggggctccactaaggcctcagtgttacagaaaccccaagatccttgctacacgagcgaggaccggaggcttgttttttggctcttgggggttctgaaagaagtagaggttcgggatgggtggaggagtgctgtatccccaaatctcatggcctctatctccctgactcagctcaccccagaggaagaggagaagcgaagggtgcgccgggaacgaaataaactagcagcagctaaatgcaggaaccggcggagggagctgaccgaccgactccaggcggtgaggacaggccctggggtgggagaggggatgctgaggggagctctctccccattctctgccccctctccacctgtacccttatcctgggttgagaactagacgttctacacatggaactaggtactgctgtggccagactgggtagcccagggcacaaacacagacccccatggacttaagtcaactcctggtccccccccccatttcctgaccccacggactactctcctagccttcatttcatcccgaggggccacatggggcccttgaggagaggggcgcccccatcatttctcccatctggtcttcagcaagtaacaacccattttgcctcagtttctccatctctgcaaaccctcatcaaatctcccgggctctttctacccttaacactctggaaagcctgtgaaatgaaattattccacctcctgccctagccacccacagctctcctggtgctggtggcatcccccaaaacccactcccttcctacgtcctcccttggtctgagagttccctgctgtatgcctgcagggtgagctgttactccttgagggaacaagggaattgtcaactttccttctctactttttctcttccccgggaggtagagagggaggggtaatagaagggaacacattaaaaacacataacagtggctcatgcctgtgatcccagcactttgagaggccaaggcaggaggattgcttgagcccaggagtttgagaccagcctgggaaacatagggaggacttgtctctaccaagaaaaaaaaaaattagttgggcatggtggtgcacaccactgtggtcccagctactatggaggctttagtgggaggatcgcttgagccgaggaggtccaggctgcagtgagccatgattgcactattgcactccagcctgggggacagagcgagactctggctcaaaagcaaaacaaaaccaaccacataacgattgttcattcattcaacaaacctcctgcacaccagaaacttccccataaacctggccccttctgtaccatcctttggacagatgggggaaactgaggttcctggaaggcaagacccttgccccaactcccatggccaccaggactccatctcaggaggtgttttttctcagcccggggctgccttccagcagcaagtccaagggagccatgacccgagtttcccggtcactgacatgcttttttctccttcctctctctcttctgtgacctggcctccctggcctcaggagacagatcagttggaggaagaaaaagcagagctggagtcggagatcgccgagctccaaaaggagaaggaacgtctggagtttgtgctggtggcccacaaaccgggctgcaagatcccctacgaagaggggcccgggccgggcccgctggcggaggtgagagatttgccgggctcagcaccggctaaggaagatggcttcagctggctgctgccgcccccgccaccaccgcccctgcccttccagaccagccaagacgcaccccccaacctgacggcttctctctttacacacagtgaagttcaagtcctcggcgaccccttccccgttgttaacccttcgtacacttcttcgtttgtcctcacctgcccggaggtctccgcgttcgccggcgcccaacgcaccagcggcagtgaccagccttccgatcccctgaactcgccctccctcctcgctctgtgaactctttagacacacaaaacaaacaaacacatgggggagagagacttggaagaggaggaggaggaggagaaggaggagagagaggggaagagacaaagtgggtgtgtggcctccctggctcctccgtctgaccctctgcggccactgcgccactgccatcggacaggaggattccttgtgttttgtcctgcctcttgtttctgtgccccggcgaggccggagagctggtgactttggggacagggggtgggaaggggatggacacccccagctgactgttggctctctgacgtcaacccaagctctggggatgggtggggaggggggcgggtgacgcccaccttcgggcagtcctgtgtgaggatgaagggacgggggtgggaggtaggctgtggggtgggctggagtcctctccagagaggctcaacaaggaaaaatgccactccctacccaatgtctcccacacccaccctttttttggggtgcctaggttggtttcccctgcactcccgaccttagcttattgatcccacatttccatggtgtgagatcctctttactctgggcagaagtgagccccccccttaaagggaattcgatgcccccctagaataatctcatccccccacccgacttcttttgaaatgtgaacgtccttccttgactgtctagccactccctcccagaaaaactggctctgattggaatttctggcctcctaaggctccccaccccgaaatcagcccccagccttgtttctgatgacagtgttatcccaagaccctgccccctgccagccgaccctcctggccttcctcgttgggccgctctgatttcaggcagcaggggctgctgtgatgccgtcctgctggagtgatttatactgtgaaatgagttggccagattgtggggtgcagctgggtggggcagcacacctctggggggataatgtccccactcccgaaagcctttcctcggtctcccttccgtccatcccccttcttcctcccctcaacagtgagttagactcaagggggtgacagaaccgagaagggggtgacagtcctccatccacgtggcctctctctctctcctcaggaccctcagccctggcctttttctttaaggtcccccgaccaatccccagcctaggacgccaacttctcccaccccttggcccctcacatcctctccaggaagggagtgaggggctgtgacatttttccggagaagatttcagagctgaggctttggtacccccaaacccccaatatttttggactggcagactcaaggggctggaatctcatgattccatgcccgagtccgcccatccctgaccatggttttggctctcccaccccgccgttccctgcgcttcatctcatgaggatttctttatgaggcaaatttatattttttaatatcggggggtggaccacgccgccctccatccgtgctgcatgaaaaacattccacgtgccccttgtcgcgcgtctcccatcctgatcccagacccattccttagctatttatccctttcctggtttccgaaaggcaattatatctattatgtataagtaaatatattatatatggatgtgtgtgtgtgcgtgcgcgtgagtgtgtgagcgcttctgcagcctcggcctaggtcacgttggccctcaaagcgagccgttgaattggaaactgcttctagaaactctggctcagcctgtctcgggctgacccttttctgatcgtctcggcccctctgattgttcccgatggtctctctccctctgtcttttctcctccgcctgtgtccatctgaccgttttcacttgtctcctttctgactgtccctgccaatgctccagctgtcgtctgactctgggttcgttggggacatgagattttattttttgtgagtgagactgagggatcgtagatttttacaatctgtatctttgacaattctgggtgcgagtgtgagagtgtgagcagggcttgctcctgccaaccacaattcaatgaatccccgacccccctaccccatgctgtacttgtggttctctttttgtattttgcatctgaccccggggggctgggacagattggcaatgggccgtcccctctccccttggttctgcactgttgccaataaaaagctcttaaaaacgcattcgccaggctacagtgtttatttcctcctaacacccattgcctggcttccttttagtaagagaggatgaggttagattgtcgaaggactacacacacacagagatcatacacccatgcacacacacacacagacacacacctatgcaggaactccttctagtcaatgggtctacagcaggataaaaggaaggcagacagtcaggaggacttcctgtactcgcaggcagtgcctcctactagaaaaagtaagtggctacagctgggcgcagtggcttgcgcctgtaatcccagcattttgggaggccaagatgggcggatcacttgaggtcaggagtttgagaccagccttgccaagatggtgaaaccctgtctctacaaaaaatacaaaaattagcctggtgtggtggtgcacacctgtaatcccaggctacttgagaggttgaggcaggagaatcactttaacttaggaggcagaggttgcagtgacacaagattgcaccactgcactccagcctgggtgacaaagtgaaactgtcaaaaaaaaaaaaaaaagtaaggggtcagaaggttagcctgcaggtgtgggatcacagaggtctcctagtgatggagcttgtatgctctatgggttaaaaacagacgctaaggagataaactatacacagaagaagcttaatgggctgtgcacagtggcttgcacttgcaatcccagctctttcggaggccgaggtaggaggctaggagttcgagaacagcctggggcaacatagtgagacaccccccaccccaacccatctcattatgttgagaaaaaaaaaaaaaagaggatcttgagaaacttgcacagcaaactactaaagaccactcaggctaggaatgaggcgtcatcttggattttttacaaactacaactacaaaaaacaattattttacactgaagatgtgtttccttttgttttccatatgaccactattggggccaacccaagactgactgaagcaaatatatgaccattttttttttttacacatagagtggagccatccccattgcaaaatcctagccgtctcttatttgcataacagcaagtcctctgggaattgaggtgagggtccaggggtcgctcagacgctttggtaaatcaataagcaagggaatttgtcatggtggaatccatttattaattcactcaaaaaaatgtgctaagcacctacccaactgtgctgggagttggggacactatagggactgagcctcaggtcttgccctcctggggctcacagtccattgggggacacacaccgttgccagtcagggacaacctaaagtggattgggtttgggaagcccatggggctagggaagcacagcagggacacctagcttggactgggagtcgggaaaaacttcctggcggaggggacagctgagctgagtcctagaggaggatagagagtatagaaagaaatagaaaaaggccaaggccaagaaaatagcacagccatagatctgttggtggggagaaggcttgatacattgagaacgcttagagggtcgggtgcgatggctcatgcctgtaatcccagcactttgggaggccgaggtgggtggatcacctgaggtcaggcattcaagaccagtctggccaacgtggcgaaaccccgtctctactaaaaaatatatatatatatatacaaaaaattagctaggcatggtggtgggcacctgtgatcccagctactcgggaggctgaggcaggagaatcgcttgaacctggaaagtggacattgcagtgagctgagattgtgccactgcactccagcctgggcaacacagcgagactctgtctcaaaaaaaaaaaaaaaagaaagaaaaaaaagagaaaactcagagattcgtggagactggaaccacgggtgtggagagaggggttagtagagaccagattctgcaggtactataatgacattcccaggctaaggagtttagatcttt

SEQ ID NO: 193 - DNA, 2545 bp, Homo sapiens
actcattcacataaaacgctgcgcggccggcggaatccccggcttctagggcggcgagcggccgggctggctatcgagcgagcggggcgggaacgcggagttgcgccgccgctcgggcgccgggctccgtcgcggccgcagccccgcgggtcgccctcccgtgcctcgcccgcggacaccctggccgtggacaccctggccgtgggcacccgcggggcgcgcggcgcggggccgctggccggcggcggcggcggcatgaaggtcacgtcgctcgacgggcgccagctgcgcaagatgctccgcaaggaggcggcggcgcgctgcgtggtgctcgactgccggccctatctggccttcgctgcctcgaacgtgcgcggctcgctcaacgtcaacctcaactcggtggtgctgcggcgggcccggggcggcgcggtgtcggcgcgctacgtgctgcccgacgaggcggcgcgcgcgcggctcctgcaggagggcggcggcggcgtcgcggccgtggtggtgctggaccagggcagccgccactggcagaagctgcgagaggagagcgccgcgcgtgtcgtcctcacctcgctactcgcttgcctacccgccggcccgcgggtctacttcctcaaagggggatatgagactttctactcggaatatcctgagtgttgcgtggatgtaaaacccatttcacaagagaagattgagagtgagagagccctcatcagccagtgtggaaaaccagtggtaaatgtcagctacaggccagcttatgaccagggtggcccagttgaaatccttcccttcctctaccttggaagtgcctaccatgcatccaagtgcgagttcctcgccaacctgcacatcacagccctgctgaatgtctcccgacggacctccgaggcctgcgcgacccacctacactacaaatggatccctgtggaagacagccacacggctgacattagctcccactttcaagaagcaatagacttcattgactgtgtcagggaaaagggaggcaaggtcctggtccactgtgaggctgggatctcccgttcacccaccatctgcatggcttaccttatgaagaccaagcagttccgcctgaaggaggccttcgattacatcaagcagaggaggagcatggtctcgcccaactttggcttcatgggccagctcctgcagtacgaatctgagatcctgccctccacgcccaacccccagcctccctcctgccaaggggaggcagcaggctcttcactgataggccatttgcagacactgagccctgacatgcagggtgcctactgcacattccctgcctcggtgctggcaccggtgcctacccactcaacagtctcagagctcagcagaagccctgtggcaacggccacatcctgctaaaactgggatggaggaatcggcccagccccaagagcaactgtgatttttgtttttaagactcatggacatttcatacctgtgcaatactgaagacctcattctgtcatgctgccccagtgagatagtgagtggtcaccaggcttgcaaatgaacttcagacggacctcagggtaggttctcgggactgaaggaaggccaagccattacgggagcacagcatgtgctgactactgtacttccagacccctgccctcttgggactgcccagtccttgcacctcagagttcgccttttcatttcaagcataaggcaataaatacctgcagcaacgtgggagaaagaagttgctggaccaggagaaaaggcagttatgaagccaattcattttgaaggaagcacaatttccaccttattttttgaactttggcagtttcaatgtctgtctctgttgcttcggggcataagctgatcaccgtctagttgggaaagtaaccctacagggtttgtagggacatgatcagcatcctgatttgaaccctgaaatgttgtgtagacaccctcttgggtccaatgaggtagttggttgaagtagcaagatgttggcttttctggattttttttgccatgggttcttcactgaccttggactttggcatgattcttagtcatacttgaacttgtctcattccacctcttctcagagcaactcttcctttgggaaaagagttcttcagatcatagaccaaaaaagtcataccttcgaggtggtagcagtagattccaggaggagaagggtacttgctaggtatcctgggtcagtggcggtgcaaactggtttcctcagctgcctgtccttctgtgtgcttatgtctcttgtgacaattgttttcctccctgcccctggaggttgtcttcaagctgtggacttctgggatttgcagattttgcaacgtggtactactttttttttctttttgtctgttagttatttctccaggggaaaaggcaataattttctaagacccgtgtgaatgtgaagaaaagcagtatgttactggttgttgttgttgttcttgttttttatagtgtaaaataaaaatagtaaaaggagaaaagcaaaaaaaaaaaaaaaaaa

SEQ ID NO: 194 - DNA, 402 bp, Homo sapiens
aattaatctcagccacctagttctaaatgtagagcaaggattgcaagggattatttagacaagttcatcaattaagtaaaattagacatgaaggatataagaatgaatgataaagcaagctaaaaatggtgaaacaagggatgtctgattggaagtagaagatatttatttaggttctaggacattagtatcagtgaggacagtaatttcctgcttgtttgtatttcagtgatcacatacacttctttacctgataacgtctctcttctctaggctggttttggttacggcttgccaatttctcgtctgtatgccaagtactttcaaggagatctgaatctctactctttatcaggatatggaacagatgctatcatctacttaaaggtatcccttgaattc

SEQ ID NO: 195 - DNA, 1945 bp, Homo sapiens
agccccaagcttaccacctgcacccggagagctgtgtcaccatgtgggtcccggttgtcttcctcaccctgtccgtgacgtggattggtgagaggggccatggttggggggatgcaggagagggagccagccctgactgtcaagctgaggctctttcccccccaacccagcaccccagcccagacagggagctgggctcttttctgtctctcccagccccactccaagcccatacccccagcccctccatattgcaacagtcctcactcccacaccaggtccccgctccctcccacttaccccagaactttctccccattgcccagccagctccctgctcccagctgctttactaaaggggaagttcctgggcatctccgtgtttctctttgtggggctcaaaacctccaaggacctctctcaatgccattggttccttggaccgtatcactggtccacctcctgaggccctcaatcctatcacagtctactgacttttcccattcagctgtgagtgcccaaccctatcccagagaccttgatgcttggcctcccaatcttgccctaggatacccagatgccaaccagacacctccttcttcctagccaggctatctggcctgagacaacaaatgggtccctcagtctggcaatgggactctgagaactcctcattccctgactcttagccccagactcttcattcagtggcccacattttccttaggaaaaacatgagcatccccagccacaactgccagctctctgattccccaaatctgcatccttttcaaaacctaaaaacaaaaagaaaaacaaataaaacaaaaccaactcagaccagaactgttttctcaacctgggacttcctaaactttccaaaaccttcctcttccagcaactgaacctcgccataaggcacttatccctggttcctagcaccccttatcccctcagaatccacaacttgtaccaagtttcccttctcccagtccaagaccccaaatcaccacaaaggacccaatccccagactcaagatatggtctgggcgctgtcttgtgtctcctaccctgatccctgggttcaactctgctcccagagcatgaagcctctccaccagcaccagccaccaacctgcaaacctagggaagattgacagaattcccagcctttcccagctccccctgcccatgtcccaggactcccagccttggttctctgcccccgtgtcttttcaaacccacatcctaaatccatctcctatccgagtcccccagttcctcctgtcaaccctgattcccctgatctagcaccccctctgcaggtgctgcacccctcatcctgtctcggattgtgggaggctgggagtgcgagaagcattcccaaccctggcaggtgcttgtggcctctcgtggcagggcagtctgcggcggtgttctggtgcacccccagtgggtcctcacagctgcccactgcatcaggaacaaaagcgtgatcttgctgggtcggcacagcctgtttcatcctgaagacacaggccaggtatttcaggtcagccacagcttcccacacccgctctacgatatgagcctcctgaagaatcgattcctcaggccaggtgatgactccagccacgacctcatgctgctccgcctgtcagagcctgccgagctcacggatgctgtgaaggtcatggacctgcccacccaggagccagcactggggaccacctgctacgcctcaggctggggcagcattgaaccagaggagttcttgaccccaaagaaacttcagtgtgtggacctccatgttatttccaatgacgtgtgtgcgcaagttcaccctcagaaggtgaccaagttcatgctgtgtgctggacgctggacagggggcaaaagcacctgctcgggtgattctgggggcccacttgtctgtaatggtgtg

SEQ ID NO: 196 - DNA, 1745 bp, Homo sapiens
agcctgacttcagcgctcccactctcggccgacacccctcatggccaaccgttacaccatggatctgactgccatctacgagagcctcctgtcgctgagccctgacgtgcccgtgccatccgaccatggagggactgagtccagcccaggctggggctcctcgggaccctggagcctgagcccctccgactccagcccgtctggggtcacctcccgcctgcctggccgctccaccagcctagtggagggccgcagctgtggctgggtgcccccaccccctggcttcgcaccgctggctccccgcctgggccctgagctgtcaccctcacccacttcgcccactgcaacctccaccaccccctcgcgctacaagactgagctatgtcggaccttctcagagagtgggcgctgccgctacggggccaagtgccagtttgcccatggcctgggcgagctgcgccaggccaatcgccaccccaaatacaagacggaactctgtcacaagttctacctccagggccgctgcccctacggctctcgctgccacttcatccacaaccctagcgaagacctggcggccccgggccaccctcctgtgcttcgccagagcatcagcttctccggcctgccctctggccgccggacctcaccaccaccaccaggcctggccggcccttccctgtcctccagctccttctcgccctccagctccccaccaccacctggggaccttccactgtcaccctctgccttctctgctgcccctggcacccccctggctcgaagagaccccaccccagtctgttgcccctcctgccgaagggccactcctatcagcgtctgggggcccttgggtggcctggttcggaccccctctgtacagtccctgggatccgaccctgatgaatatgccagcagcggcagcagcctggggggctctgactctcccgtcttcgaggcgggagtttttgcaccaccccagcccgtggcagccccccggcgactccccatcttcaatcgcatctctgtttctgagtgacaaagtgactgcccggtcagatcagctggatctcagcggggagccacgtctcttgcactgtggtctctgcatggaccccagggctgtggggacttgggggacagtaatcaagtaatccccttttccagaatgcattaacccactcccctgacctcacgctggggcaggtccccaagtgtgcaagctcagtattcatgatggtgggggatggagtgtcttccgaggttcttgggggaaaaaaaattgtagcatatttaagggaggcaatgaaccctctcccccacctcttccctgcccaaatctgtctcctagaatcttatgtgctgtgaataataggccttcactgcccctccagtttttatagacctgaggttccagtgtctcctggtaactggaacctctcctgagggggaatcctggtgctcaaattaccctccaaaagcaagtagccaaagccgttgccaaaccccacccataaatcaatgggccctttatttatgacgactttatttattctaatatgattttatagtatttatatatattgggtcgtctgcttcccttgtatttttcttcctttttttgtaatattgaaaacgacgatataattattataagtagactataatatatttagtaatatatattattaccttaaaagtctatttttgtgttttgggcatttttaaataaacaatctgagtgt

SEQ ID NO: 197 - DNA, 1598 bp, Homo sapiens
gcgcacgtcccggattcctcccacgagggggcgggctgcggccaaatctcccgccaggtcagcggccgggcgctgattggccccatggcggcggggccggctcgtgattggccagcacgccgtggtttaaagcggtcggcgcgggaaccaggggcttactgcgggacggccttggagagtactcgggttcgtgaacttcccggaggcgcaatgagctgcattaacctgcccactgtgctgcctggctcccccagcaagacccgggggcagatccaggtgattctcgggccgatgttctcaggaaaaagcacagagttgatgagacgcgtccgtcgcttccagattgctcagtacaagtgcctggtgatcaagtatgccaaagacactcgctacagcagcagcttctgcacacatgaccggaacaccatggaggcactgcccgcctgcctgctccgagacgtggcccaggaggccctgggcgtggctgtcataggcatcgacgaggggcagtttttccctgacatcgtggagttctgcgaggccatggccaacgccgggaagaccgtaattgtggctgcactggatgggaccttccagaggaagccatttggggccatcctgaacctggtgccgctggccgagagcgtggtgaagctgacggcggtgtgcatggagtgcttccgggaagccgcctataccaagaggctcggcacagagaaggaggtcgaggtgattgggggagcagacaagtaccactccgtgtgtcggctctgctacttcaagaaggcctcaggccagcctgccgggccggacaacaaagagaactgcccagtgccaggaaagccaggggaagccgtggctgccaggaagctctttgccccacagcagattctgcaatgcagccctgccaactgagggacctgcgagggccgcccgctcccttcctgccactgccgcctactggacgctgccctgcatgctgcccagccactccaggaggaagtcgggaggcgtggagggtgaccacaccttggccttctgggaactctcctttgtgtggctgccccacctgccgcatgctccctcctctcctacccactggtctgcttaaagcttccctctcagctgctgggacgatcgcccaggctggagctggccccgcttggtggcctgggatctggcacactccctctccttggggtgagggacagagccccacgctgttgacatcagcctgcttcttcccctctgcggctttcactgctgagtttctgttctccctgggaagcctgtgccagcacctttgagccttggcccacactgaggcttaggcctctctgcctgggatgggctcccaccctcccctgaggatggcctggattcacgccctcttgtttccttttgggctcaaagcccttcctacctctggtgatggtttccacaggaacaacagcatctttcaccaagatgggtggcaccaaccttgctgggacttggatcccaggggcttatctcttcaagtgtggagagggcagggtccacgcctctgctgtagcttatgaaattaactaattgaaaattcactggttggtggaaaa

SEQ ID NO: 198 - DNA, 3614 bp, Homo sapiens
gctacaagatgaccactgaggattacaagaagctgtgagtatgcaacgccaggcaccctacaatatcaggcgcagctctacatcaggggacaccgaggaggaggaggaggaggaggtggtgccattctcctcagatgaacagaaacggaggtcagaggctgcaagcggtgttctgaggaggacagctccccgggagcactcctacgtcctgtcagcggccaagaagagcactggcagtcctacccaggagacacaggcaccgtttatcgcgaagagggtggaggtggtggaagaggacgggccttctgagaagagccaggacccacctgctctggcaagatccactcctggctcaaacagctcaagaggtgaggaaattgtccgcctgcagatcctgacacccagggcaggactccgcctggtggccccagacgtggaaggcatgagctccagtgccacttcagtctctgctgtccctgctgataggaagagcaacagcacagcagcccaggaggatgcaaaggcagacccaaagggggccttggctgattgtgaggggaaggatgtacccaccagggtcggagaggcctggcaggagaggcctggagctccaagaggtggccaaggagacccagctgtacccgctcagcaacctgcagatcccagcaccccagagcggcagagcagccccagcggatctgagcaacttgtcagacgagagagttgtggcagtagcgtgttgactgattttgaggggaaggatgtggccaccaaggtcggagaggcctggcaggacaggcctagagccccaagaggtggccaaggagacccagctgtacccactcagcaacctgcagatcccagtaccccagaacagcagaacagccccagcggatctgagcaattcgtcagacgagagagctgcaccagcagggtgaggagcccctcgagctgcatggtcactgttactgtcactgccacatctgagcagcctcacatttatattccagcccccgcaagtgaattggactccagctctaccaccaaagggattctcttcgtgaaggagtacgtgaatgctagtgaagtgtcttctgggaagccagtatctgcacgctatagcaacgtcagcagcattgaggactcattcgccatggagaagaagcctccatgtggcagcactccatactctgagaggacaactggagggatctgtacttactgcaaccgtgagatccgagactgtccaaagattaccctagaacatcttggtatctgctgccatgaatattgctttaagtgtgggatttgcagtaaaccgatgggcgatctcctggatcagatcttcattcaccgtgacaccattcactgtgggaaatgctatgagaagctcttctagcgaccccccaccgccaggctgatcagaagctgatgactcgtggacaaatttggctgtccccagttttgccccaagttgctgtctccccttccctcacctcctccctccctgtttgatttcttcatgcttttgcccttctcaagttgaagttgcatacatccaatatcgtatcttaatgatgctatgataattgcttgtgtgtgtagcttcttgtagcttagaaagcgctttatgcccatgatgtcatttcaggctcaaccaaagaggatcaaacaggaattccatcttggcttccctaagacagattggctttctaatgagtttaagtgggcagaagtgtagggttcagtgtgtcctgactcccttgaggcttataatgggccaagttgaagactgttgatgatccctggtgggtaaattgcagacatcaaatgctagggattggcataggctagtgtttagcttgtctatttgccatatctatttttttaaatttccatacacttgtaaaagtagttagttgcttttgattgagttatatagcagtttttcatttggtcttccactcaccgttcactatatttgagtgttcccttacaggtatgttggcatgtgttggaaaatttacacaattaggtttaaattcagtaggatgtgattttgggggtggactgatcaaagtgatatctgtgtctgttggaatcttgatagctgattaatttgccctcaattctgctccctgaacttcacacataaatcttcccaagtgggttttagggtgtatagatcccagcaggattaaggaagtggaaaagcagctaacatttcttgaggctctaccacatagcaggcactgtcacagagtaatggcattaatccccataataatcctgtgaaggtgatattctcatcccatcttagacatgaggatattggaactcagagaggtggctattgcattgcgcagaacgctacagagcccatgctcttcccagagcagcacccacaaaagcaagcattgattttgtgctcagtgtgtgccaagcactgtgcagagggtacacagttcctgccaggttaacaccctcccttcaggcctcccaaaggcataggcttgcaaagagcagaaggtgtgaaatcacactcttcctctgggcatcctggatccctgaattatccccccccccatgaagtacttcaagggccaagctgcccctttccctcctctccgcccatgaaaatgcctccaaactgagatgctttcagctgagaacagatttgactcacagacattaccaaagaggagcttgtgaatccaggaaaagctccagggggctagctgatctgagcagagagctttcagtgacccattttcctgtctagactctgccttaagctagtggcaactgctggggccccaggtacttgggacatggaaactcgttggatggctgggcagatgtaagcctgtccatgcagtcagccgatcctctgctcaggttcagctggactctgccatctgtgggcccagcatcactctgtaagttccttgaaaggaagaacaaccttagagtatttctgatacaaaatgagggcctctgctcttgatttaattataaaatgtctacgtctttctccagtttctgagccctatgcacattggcttgtgggcttgttcttcctgccaaatgatcagagagggaacattccatttatttgtagtggatttcctctggagggcatgtacccacactaaataccaactgctcttcctcagctgtagtccccaacatcagacttggcacgtggtggacactaacacacaggcactcaatgaatgagtgaaggaaataaaagtcaccccccgttggtgagaaggtgcctatccccctgagtcctcagtgcaggaccagtggatgaaaggcaaggtaaagaggcccaagataggctggcttcccccgttcaaggtatagtctgcctttaagggagttttagaaccaacatgcaagacattgaaagaaatcttgcaagagccattattgacttagatccaaaacagcctctctcatgtctaaaaaggcacagaattttgcagatctgaggaagagggatgcattacctttttgcttcttttcaattgcttagtgtttctaatcatacttaatccacactaatgtgcgcaattataataaatgctaaaatatcaaaaaaaaaa

SEQ ID NO: 199 - DNA, 3834 bp, Homo sapiens
cctgagacagaggcagcagtgatacccacctgagagatcctgtgtttgaacaactgcttcccaaaacggaaagtatttcaagcctaaacctttgggtgaaaagaactcttgaagtcatgattgcttcacagtttctctcagctctcactttggtgcttctcattaaagagagtggagcctggtcttacaacacctccacggaagctatgacttatgatgaggccagtgcttattgtcagcaaaggtacacacacctggttgcaattcaaaacaaagaagagattgagtacctaaactccatattgagctattcaccaagttattactggattggaatcagaaaagtcaacaatgtgtgggtctgggtaggaacccagaaacctctgacagaagaagccaagaactgggctccaggtgaacccaacaataggcaaaaagatgaggactgcgtggagatctacatcaagagagaaaaagatgtgggcatgtggaatgatgagaggtgcagcaagaagaagcttgccctatgctacacagctgcctgtaccaatacatcctgcagtggccacggtgaatgtgtagagaccatcaataattacacttgcaagtgtgaccctggcttcagtggactcaagtgtgagcaaattgtgaactgtacagccctggaatcccctgagcatggaagcctggtttgcagtcacccactgggaaacttcagctacaattcttcctgctctatcagctgtgataggggttacctgccaagcagcatggagaccatgcagtgtatgtcctctggagaatggagtgctcctattccagcctgcaatgtggttgagtgtgatgctgtgacaaatccagccaatgggttcgtggaatgtttccaaaaccctggaagcttcccatggaacacaacctgtacatttgactgtgaagaaggatttgaactaatgggagcccagagccttcagtgtacctcatctgggaattgggacaacgagaagccaacgtgtaaagctgtgacatgcagggccgtccgccagcctcagaatggctctgtgaggtgcagccattcccctgctggagagttcaccttcaaatcatcctgcaacttcacctgtgaggaaggcttcatgttgcagggaccagcccaggttgaatgcaccactcaagggcagtggacacagcaaatcccagtttgtgaagctttccagtgcacagccttgtccaaccccgagcgaggctacatgaattgtcttcctagtgcttctggcagtttccgttatgggtccagctgtgagttctcctgtgagcagggttttgtgttgaagggatccaaaaggctccaatgtggccccacaggggagtgggacaacgagaagcccacatgtgaagctgtgagatgcgatgctgtccaccagcccccgaagggtttggtgaggtgtgctcattcccctattggagaattcacctacaagtcctcttgtgccttcagctgtgaggagggatttgaattatatggatcaactcaacttgagtgcacatctcagggacaatggacagaagaggttccttcctgccaagtggtaaaatgttcaagcctggcagttccgggaaagatcaacatgagctgcagtggggagcccgtgtttggcactgtgtgcaagttcgcctgtcctgaaggatggacgctcaatggctctgcagctcggacatgtggagccacaggacactggtctggcctgctacctacctgtgaagctcccactgagtccaacattcccttggtagctggactttctgctgctggactctccctcctgacattagcaccatttctcctctggcttcggaaatgcttacggaaagcaaagaaatttgttcctgccagcagctgccaaagccttgaatcagacggaagctaccaaaagccttcttacatcctttaagttcaaaagaatcagaaacaggtgcatctggggaactagagggatacactgaagttaacagagacagataactctcctcgggtctctggcccttcttgcctactatgccagatgcctttatggctgaaaccgcaacacccatcaccacttcaatagatcaaagtccagcaggcaaggacggccttcaactgaaaagactcagtgttccctttcctactctcaggatcaagaaagtgttggctaatgaagggaaaggatattttcttccaagcaaaggtgaagagaccaagactctgaaatctcagaattccttttctaactctcccttgctcgctgtaaaatcttggcacagaaacacaatattttgtggctttctttcttttgcccttcacagtgtttcgacagctgattacacagttgctgtcataagaatgaataataattatccagagtttagaggaaaaaaatgactaaaaatattataacttaaaaaaatgacagatgttgaatgcccacaggcaaatgcatggagggttgttaatggtgcaaatcctactgaatgctctgtgcgagggttactatgcacaatttaatcactttcatccctatgggattcagtgcttcttaaagagttcttaaggattgtgatatttttacttgcattgaatatattataatcttccatacttcttcattcaatacaagtgtggtagggacttaaaaaacttgtaaatgctgtcaactatgatatggtaaaagttacttattctagattaccccctcattgtttattaacaaattatgttacatctgttttaaatttatttcaaaaagggaaactattgtcccctagcaaggcatgatgttaaccagaataaagttctgagtgtttttactacagttgttttttgaaaacatggtagaattggagagtaaaaactgaatggaaggtttgtatattgtcagatattttttcagaaatatgtggtttccacgatgaaaaacttccatgaggccaaacgttttgaactaataaaagcataaatgcaaacacacaaaggtataattttatgaatgtctttgttggaaaagaatacagaaagatggatgtgctttgcattcctacaaagatgtttgtcagatgtgatatgtaaacataattcttgtatattatggaagattttaaattcacaatagaaactcaccatgtaaaagagtcatctggtagatttttaacgaatgaagatgtctaatagttattccctatttgttttcttctgtatgttagggtgctctggaagagaggaatgcctgtgtgagcaagcatttatgtttatttataagcagatttaacaattccaaaggaatctccagttttcagttgatcactggcaatgaaaaattctcagtcagtaattgccaaagctgctctagccttgaggagtgtgagaatcaaaactctcctacacttccattaacttagcatgtgttgaaaaaaaaagtttcagagaagttctggctgaacactggcaacgacaaagccaacagtcaaaacagagatgtgataaggatcagaacagcagaggttcttttaaaggggcagaaaaactctgggaaataagagagaacaactactgtgatcaggctatgtatggaatacagtgttattttctttgaaattgtttaagtgttgtaaatatttatgtaaactgcattagaaattagctgtgtgaaataccagtgtggtttgtgtttgagttttattgagaattttaaattataacttaaaatattttataatttttaaagtatatatttatttaagcttatgtcagacctatttgacataacactataaaggttgacaataaatgtgcttatgttt

SEQ ID NO: 200 - DNA, 2876 bp, Homo sapiens
gaattcctgcagctcagcagccgccgccagagcaggacgaaccgccaatcgcaaggcacctctgagaacttcaggatgcagatgtctccagccctcacctgcctagtcctgggcctggcccttgtctttggtgaagggtctgctgtgcaccatcccccatcctacgtggcccacctggcctcagacttcggggtgagggtgtttcagcaggtggcgcaggcctccaaggaccgcaacgtggttttctcaccctatggggtggcctcggtgttggccatgctccagctgacaacaggaggagaaacccagcagcagattcaagcagctatgggattcaagattgatgacaagggcatggcccccgccctccggcatctgtacaaggagctcatggggccatggaacaaggatgagatcagcaccacagacgcgatcttcgtccagcgggatctgaagctggtccagggcttcatgccccacttcttcaggctgttccggagcacggtcaagcaagtggacttttcagaggtggagagagccagattcatcatcaatgactgggtgaagacacacacaaaaggtatgatcagcaacttgcttgggaaaggagccgtggaccagctgacacggctggtgctggtgaatgccctctacttcaacggccagtggaagactcccttccccgactccagcacccaccgccgcctcttccacaaatcagacggcagcactgtctctgtgcccatgatggctcagaccaacaagttcaactatactgagttcaccacgcccgatggccattactacgacatcctggaactgccctaccacggggacaccctcagcatgttcattgctgccccttatgaaaaagaggtgcctctctctgccctcaccaacattctgagtgcccagctcatcagccactggaaaggcaacatgaccaggctgccccgcctcctggttctgcccaagttctccctggagactgaagtcgacctcaggaagcccctagagaacctgggaatgaccgacatgttcagacagtttcaggctgacttcacgagtctttcagaccaagagcctctccacgtcgcgcaggcgctgcagaaagtgaagatcgaggtgaacgagagtggcacggtggcctcctcatccacagctgtcatagtctcagcccgcatggcccccgaggagatcatcatggacagacccttcctctttgtggtccggcacaaccccacaggaacagtccttttcatgggccaagtgatggaaccctgaccctggggaaagacgccttcatctgggacaaaactggagatgcatcgggaaagaagaaactccgaagaaaagaattttagtgttaatgactctttctgaaggaagagaagacatttgccttttgttaaaagatggtaaaccagatctgtctccaagaccttggcctctccttggaggacctttaggtcaaactccctagtctccacctgagaccctgggagagaagtttgaagcacaactcccttaaggtctccaaaccagacggtgacgcctgcgggaccatctggggcacctgcttccacccgtctctctgcccactcgggtctgcagacctggttcccactgaggccctttgcaggatggaactacggggcttacaggagcttttgtgtgcctggtagaaactatttctgttccagtcacattgccatcactcttgtactgcctgccaccgcggaggaggctggtgacaggccaaaggccagtggaagaaacaccctttcatctcagagtccactgtggcactggccacccctccccagtacaggggtgctgcaggtggcagagtgaatgtcccccatcatgtggcccaactctcctggcctggccatctccctccccagaaacagtgtgcatgggttattttggagtgtaggtgacttgtttactcattgaagcagatttctgcttccttttatttttataggaatagaggaagaaatgtcagatgcgtgcccagctcttcaccccccaatctcttggtggggaggggtgtacctaaatatttatcatatccttgcccttgagtgcttgttagagagaaagagaactactaaggaaaataatattatttaaactcgctcctagtgtttctttgtggtctgtgtcaccgtatctcaggaagtccagccacttgactggcacacacccctccggacatccagcgtgacggagcccacactgccaccttgtggccgcctgagaccctcgcgccccccgcgccccccgcgcccctctttttccccttgatggaaattgaccatacaatttcatcctccttcaggggatcaaaaggacggagtggggggacagagactcagatgaggacagagtggtttccaatgtgttcaatagatttaggagcagaaatgcaaggggctgcatgacctaccaggacagaactttccccaattacagggtgactcacagccgcattggtgactcacttcaatgtgtcatttccggctgctgtgtgtgagcagtggacacgtgaggggggggtgggtgagagagacaggcagctcggattcaactaccttagataatatttctgaaaacctaccagccagagggtagggcacaaagatggatgtaatgcactttgggaggccaaggcgggaggattgcttgagcccaggagttcaagaccagcctgggcaacataccaagacccccgtctctttaaaaatatatatattttaaatatacttaaatatatatttctaatatctttaaatatatatatatattttaaagaccaatttatgggagaattgcacacagatgtgaaatgaatgtaatctaatagaagc

SEQ ID NO: 201 - DNA, 728 bp, Homo sapiens
gcggcctcagatgaatgcggctgttaagacctgcaataatccagaatggctactctgatctatgttgataaggaaaatggagaaccaggcacccgtgtggttgctaaggatgggctgaagctggggtctggaccttcaatcaaagccttagatgggagatctcaagtttcaacaccacgttttggcaaaacgttcgatgccccaccagccttacctaaagctactagaaaggctttgggaactgtcaacagagctacagaaaagtctgtaaagaccaagggacccctcaaacaaaaacagccaagcttttctgccaaaaagatgactgagaagactgttaaagcaaaaagctctgttcctgcctcagatgatgcctatccagaaatagaaaaattctttcccttcaatcctctagactttgagagttttgacctgcctgaagagcaccagattgcgcacctccccttgagtggagtgcctctcatgatccttgacgaggagagagagcttgaaaagctgtttcagctgggccccccttcacctgtgaagatgccctctccaccatgggaatccaatctgttgcagtctccttcaagcattctgtcgaccctggatgttgaattgccacctgtttgctgtgacatagatatttaaatttcttagtgcttcagagtttgtgtgtatttgtattaataaagcattcttcaacagaaaaaaaaaaaaaaaaa

SEQ ID NO: 202 - DNA, 451 bp, Homo sapiens
tttttttttttttgcttttctcctttcactatttttattttacactataaaaaacaagaacaacaacaacaaccagtaacatactgcttttcttcacattcacacgggtcttagaaaattattgccttttcccctggagaaataactaacagacaaaaagaaaaaaaaagtagtaccacgttgcaaaatctgcaaatcccagaagtccacagcttgaagacaacctccaggggcagggaggaaaacaattgtcacaagagacataagcacacagaaggacaggcagctgaggaaaccagtttgcaccgccactgacccaggatacctagcaagtacccttctcctcctggaatctactgctaccacctcgaaggtatgacttttttggtctatgatctgaagaactcttttcccaaaggaagagttgctctgagaagaggtggaatgagac

SEQ ID NO: 203 - DNA, 1234 bp, Homo sapiens
gagctccgggaatttccctggcccgggactccgggctttccagccccaaccatgcataaaaggggttcgccgttctcggagagccacagagcccgggccacaggcagctccttgccagctctcctcctcgcacagccgctcgaaccgcctgctgagccccatggcccgcgccacgctctccgccgcccccagcaatccccggctcctgcgggtggcgctgctgctcctgctcctggtggccgccagccggcgcgcagcaggagcgcccctggccactgaactgcgctgccagtgcttgcagaccctgcagggaattcacctcaagaacatccaaagtgtgaaggtgaagtcccccggaccccactgcgcccaaaccgaagtcatagccacactcaagaatgggcagaaagcttgtctcaaccccgcatcgcccatggttaagaaaatcatcgaaaagatgctgaaaaatggcaaatccaactgaccagaaggaaggaggaagcttattggtggctgttcctgaaggaggccctgcccttacaggaacagaagaggaaagagagacacagctgcagaggccacctggattgcgcctaatgtgtttgagcatcacttaggagaagtcttctatttatttatttatttatttatttgtttgttttagaagattctatgttaatattttatgtgtaaaataaggttatgattgaatctacttgcacactctcccattatatttattgtttattttaggtcaaacccaagttagttcaatcctgattcatatttaatttgaagatagaaggtttgcagatattctctagtcatttgttaatatttcttcgtgatgacatatcacatgtcagccactgtgatagaggctgaggaatccaagaaaatggccagtgagatcaatgtgacggcagggaaatgtatgtgtgtctattttgtaactgtaaagatgaatgtcagttgttatttattgaaatgatttcacagtgtgtggtcaacatttctcatgttgaagctttaagaactaaaatgttctaaatatcccttggacattttatgtctttcttgtaaggcatactgccttgtttaatgttaattatgcagtgtttccctctgtgttagagcagagaggtttcgatatttattgatgttttcacaaagaacaggaaaataaaatatttaaaaatataaaaaaaaaaaaaaaaaaaaaaaaaaaaaaaaa

SEQ ID NO: 204 - DNA, 627 bp, Homo sapiens
agtctccggcgagttgttgcctgggctggacgtggttttgtctgctgcgcccgctcttcgcgctctcgtttcattttctgcagcgcgccacgaggatggcccacaagcagatctactactcggacaagtacttcgacgaacactacgagtaccggcatgttatgttacccagagaactttccaaacaagtacctaaaactcatctgatgtctgaagaggagtggaggagacttggtgtccaacagagtctaggctgggttcattacatgattcatgagccagaaccacatattcttctctttagacgacctcttccaaaagatcaacaaaaatgaagtttatctggggatcgtcaaatctttttcaaatttaatgtatatgtgtatataaggtagtattcagtgaatacttgagaaatgtacaaatctttcatccatacctgtgcatgagctgtattcttcacagcaacagagctcagttaaatgcaactgcaagtaggttactgtaagatgtttaagataaaagttcttccagtcagtttttctcttaagtgcctgtttgagtttactgaaacagtttacttttgttcaataaagtttgtatgttgcatttaaaaaaaaaaaaaaa

SEQ ID NO: 205 - DNA, 4128 bp, Homo sapiens
aaagatagatcctgctccaggagccgggaagccttgccctggccagctgtgctgggcacctcccctgcctgcttcctggcccacttgcaggcaaggtgagggcatgcgaatggctgccactgcctgggcggggctccaagggccacccctccccaccctctgtcccgcagtgaggacgggactctactgccgagaccaggctcacgctgagaggtgggccatgacctccgagacctcttccggaagccactgtgccaggagcaggatgctgcggcgacgggcccaggaagaggacagcaccgtcctgatcgatgtgagcccccctgaggcagagaagaggggctcttacgggagcacagcccacgcctcggagccaggtggacagcaagcggccgcctgcagagctgggagtcctgccaagccccggatcgcagacttcgtcctcgtttgggaggaggacctgaagctagacaggcagcaggacagtgccgcccgggacagaacagacatgcacaggacctggcgggagacttttctggataatcttcgtgcggctgggctgtgtgtagaccagcaggacgtccaggacgggaacaccacagtgcactacgccctcctcagcgcctcctgggctgtgctctgctactacgccgaagacctgcgcctgaagctgcccttgcaggagttacccaaccaggcctccaactggtcggccggcctgctggcatggctgggcatccccaacgtcctgctggaggttgtgccagacgtaccccccgagtactactcctgccggttcagagtgaacaagctgccacgcttcctcgggagtgacaaccaggacaccttcttcacaagcaccaagaggcaccaaattctgtttgagatcctggccaagaccccgtatggccacgagaagaaaaacctgcttgggatccaccagctgctggcagagggtgtcctcagtgccgccttccccctgcatgacggccccttcaagacgcccccagagggcccgcaggctccacgcctcaaccagcgccaagtccttttccagcactgggcgcgctggggcaagtggaacaagtaccagcccctggaccacgtgcgcaggtacttcggggagaaggtggccctctacttcgcctggctcgggttttacacaggctggctcctgccagcggcagtggtgggcacactggtgttcctggtgggctgcttcctggtgttctcagacatacccacgcaggaactgtgtggcagcaaggacagcttcgagatgtgcccactttgcctcgactgccctttctggctgctctccagcgcctgtgccctggcccaggccggccggctgttcgaccacggcggcaccgtgttcttcagcttgttcatggcactgtgggccgtgctgctgctggagtactggaagcggaagagcgccacgctggcctaccgctgggactgctctgactacgaggacactgaggagaggcctcggccccagtttgccgcctcagcccccatgacagccccgaaccccatcacgggtgaggacgagccctacttccctgagaggagccgcgcgcgccgcatgctggccggctctgtggtgatcgtggtgatggtggccgtggtggtcatgtgcctcgtgtctatcatcctgtaccgtgccatcatggccatcgtggtgtccaggtcgggcaacacccttctcgcagcctgggcctctcgcatcgccagcctcacggggtctgtagtgaacctcgtcttcatcctcatcctctccaagatctatgtatccctggcccacgtcctgacacgatgggaaatgcaccgcacccagaccaagttcgaggacgccttcaccctcaaggtgttcatcttccagttcgtcaacttctactcctcacccgtctacattgccttcttcaagggcaggtttgtgggatacccaggcaactaccacaccttgtttggagtccgcaatgaggagtgcgcggctggaggctgcctgatcgagctggcacaggagctcctggtcatcatggtgggcaagcaggtcatcaacaacatgcaggaggtcctcatcccgaagctaaagggctggtggcagaagttccggcttcgctccaagaagaggaaggcgggagcttctgcaggggctagccaggggccctgggaggacgactatgagcttgtgccctgtgagggtctgtttgacgagtacctggaaatggtgctgcagttcggcttcgtcaccatcttcgtggccgcctgtccgctcgcgccgctcttcgccctgctcaacaactgggtggagatccgcttggacgcgcgcaagttcgtctgcgagtaccggcgcccggtggccgagcgcgcccaggacatcggcatctggttccacatcctggcgggcctcacgcacctggcggtcatcagcaacgccttcctcctggccttctcgtccgacttcctgccgcgcgcctactaccggtggacccgcgcccacgacctgcgcggcttcctcaacttcacgctggcgcgagccccgtcctccttcgccgccgcgcacaaccgcacgtgcaggtatcgggctttccgggatgacgatggacattattcccagacctactggaatcttcttgccatccgcctggccttcgtcattgtgtttgagcatgtggttttctccgttggccgcctcctggacctcctggtgcctgacatcccagagtctgtggagatcaaagtgaagcgggagtactacctggctaagcaggcactggctgagaatgaggttctttttggaacgaacggaacaaaggatgagcagcccgagggctcagagctcagctcccactggacacccttcacggttcccaaggccagccagctgcagcagtgacgcctggaaggacatctggtggtccttaggggagtggcccctcctgagccctgcgagcagcgtccttttcctcttccctcaggcagcggctgtgtgaaccgctggctgctgttgtgcctcatctctgggcacattgcctgcttccccccagcgccggcttctctcctcagagcgcctgtcactccatccccggcagggagggaccgtcagctcacaaggccctctttgtttcctgctcccagacataagcccaaggggcccctgcacccaagggaccctgtccctcggtggcctccccaggcccctggacacgacagttctcctcaggcaggtgggctttgtggtcctcgccgcccctggccacatcgccctctcctcttacacctggtgaccttcgaatgtttcagagcgcagggccgttctccctcgtgtcctctggacccacccgccccttcctgccctgtttgcgcagggacatcacccacatgccccagctctcggaccctgcagctctgtgtcccaggccacagcaaaggtctgttgaacccctccctccattcccagttatctgggtcctctggattcttctgtttcttgaatcaggctctgctttccccctagccactacaggcagcctctgacagtgccgctttacttgcattctgcagcaattacatgtgtccttttgatccttgcccaacttccctccctctcccagctcctggcccctggcccagggcccctcttgctgtttttacctctgttccttggggcctagtacccagcaagcacccaaatgggggaggttttgggatgagaggaggaaacgtgtatacctgtaacatctggtggctcttcccccagaagtttgtgttcatacataattgttttccacgctggatcataatgtgacgtgcagttctgccctgtgctggggagccacatgaagcttcccctggctaacttgctaccccgcagcaatcccagtgtggccgtctgcttgctaaaaaatggatctgtgctcatctgtattgatgtccttggagttctacaagtggaacttaagtgtcaaaaagaatatgtggtttttagctgagcgtggtggctcacacctgtaatcccaggactttgggaggctgaggcaggaggattacaaggtcaggagttcgggactagcctgtccaacatggtgaaaccctgtctttactaaaaatgcaaaaatt

SEQ ID NO: 206 - DNA, 916 bp, Homo sapiens
aaagatagatcctgctccaggagccgggaagccttgccctggccagctgtgctgggcacctcccctgcctgcttcctggcccacttgcaggcaaggtgagggcatgcgaatggctgccactgcctgggcggggctccaagggccacccctccccaccctctgtcccgcagtgaggacgggactctactgccgagaccaggctcacgctgagaggtgggccatgacctccgagacctcttccggaagccactgtgccaggagcaggatgctgcggcgacgggcccaggaagaggacagcaccgtcctgatcgatgtgagcccccctgaggcagagaagaggggctcttacgggagcacagcccacgcctcggagccaggtggacagcaagcggccgcctgcagagctgggagtcctgccaagccccggatcgacttcgtcctcgtttgggaggaggacctgaagctagacaggcagcaggacagtgccgcccgggacagaacagacatgcacaggacctggcgggagacttttctggataatcttcgtgcggctgggctgtgtgtagaccaggtacgtggaggctgtcatgggcagggccctaggccctgcatccactcagtgacccatgaccttgccgcatgaggcctgagggcatggtgtccagagtcccagagcagatcaggccccaaagtcctgctggaccccccagccaccgtgagctcctccgtgtggctagggagctgctgtccagaggcggaggtaaacattgatccctcctgcacactcagctctctcatggaagtcggagccctcagggtcacctgaaaactctgacactacctttgccattcacctgtcccgtctccaacattaaagcttttgggtaggcgaaaaaaaaaaaaaaaaaaaaaaaaa

SEQ ID NO: 207 - DNA, 1906 bp, Homo sapiens
agccccaagcttaccacctgcacccggagagctgtgtcaccatgtgggtcccggttgtcttcctcaccctgtccgtgacgtggattggtgctgcacccctcatcctgtctcggattgtgggaggctgggagtgcgagaagcattcccaaccctggcaggtgcttgtggcctctcgtggcagggcagtctgcggcggtgttctggtgcacccccagtgggtcctcacagctgcccactgcatcaggaacaaaagcgtgatcttgctgggtcggcacagcctgtttcatcctgaagacacaggccaggtatttcaggtcagccacagcttcccacacccgctctacgatatgagcctcctgaagaatcgattcctcaggccaggtgatgactccagccacgacctcatgctgctccgcctgtcagagcctgccgagctcacggatgctgtgaaggtcatggacctgcccacccaggagccagcactggggaccacctgctacgcctcaggctggggcagcattgaaccagaggagttcttgaccccaaagaaacttcagtgtgtggacctccatgttatttccaatgacgtgtgtgcgcaagttcaccctcagaaggtgaccaagttcatgctgtgtgctggacgctggacagggggcaaaagcacctgctcgtgggtcattctgatcaccgaactgaccatgccagccctgccgatggtcctccatggctccctagtgccctggagaggaggtgtctagtcagagagtagtcctggaaggtggcctctgtgaggagccacggggacagcatcctgcagatggtcctggcccttgtcccaccgacctgtctacaaggactgtcctcgtggaccctcccctctgcacaggagctggaccctgaagtcccttccccaccggccaggactggagcccctacccctctgttggaatccctgcccaccttcttctggaagtcggctctggagacatttctctcttcttccaaagctgggaactgctatctgttatctgcctgtccaggtctgaaagataggattgcccaggcagaaactgggactgacctatctcactctctccctgcttttacccttagggtgattctgggggcccacttgtctgtaatggtgtgcttcaaggtatcacgtcatggggcagtgaaccatgtgccctgcccgaaaggccttccctgtacaccaaggtggtgcattaccggaagtggatcaaggacaccatcgtggccaacccctgagcacccctatcaaccccctattgtagtaaacttggaaccttggaaatgaccaggccaagactcaagcctccccagttctactgacctttgtccttaggtgtgaggtccagggttgctaggaaaagaaatcagcagacacaggtgtagaccagagtgtttcttaaatggtgtaattttgtcctctctgtgtcctggggaatactggccatgcctggagacatatcactcaatttctctgaggacacagataggatggggtgtctgtgttatttgtggggtacagagatgaaagaggggtgggatccacactgagagagtggagagtgacatgtgctggacactgtccatgaagcactgagcagaagctggaggcacaacgcaccagacactcacagcaaggatggagctgaaaacataacccactctgtcctggaggcactgggaagcctagagaaggctgtgagccaaggagggagggtcttcctttggcatgggatggggatgaagtaaggagagggactggaccccctggaagctgattcactatggggggaggtgtattgaagtcctccagacaaccctcagatttgatgatttcctagtagaactcacagaaataaagagctgttatactgtg

SEQ ID NO: 208 - DNA, 493 bp, Homo sapiens
gccacttctcttcccttcattcttcgccaggctctctgctgactcaagttcttcagttcacgatcttctagttgcagcgatgagtgcacgagtgagatcaagatccagaggaagaggagatggtcaggaggctcccgatgtggttgcattcgtggctcccggtgaatctcagcaagaggaaccaccaactgacaatcaggatattgaacctggacaagagagagaaggaacacctccgatcgaagaacgtaaagtagaaggtgattgccaggaaatggatctggaaaagactcggagtgagcgtggagatggctctgatgtaaaagagaagactccacctaatcctaagcatgctaagactaaagaagcaggagatgggcagccataagttaaaaagaagacaagctgaagctacacacatggctgatgtcacattgaaaatgtgactgaaaatttgaaaattctctcaataaagtttgagttttctctgaag

SEQ ID NO: 209 - DNA, 555 bp, Homo sapiens
agccccaagcttaccacctgcacccggagagctgtgtcaccatgtgggtcccggttgtcttcctcaccctgtccgtgacgtggattggtgctgcacccctcatcctgtctcggattgtgggaggctgggagtgcgagaagcattcccaaccctggcaggtgcttgtggcctctcgtggcagggcagtctgcggcggtgttctggtgcacccccagtgggtcctcacagctgcccactgcatcaggaagtgagtaggggcctggggtctggggagcaggtgtctgtgtcccagaggaataacagctgggcattttccccaggataacctctaaggccagccttgggactgggggagagagggaaagttctggttcaggtcacatggggaggcagggttggggctggaccaccctccccatggctgcctgggtctccatctgtgttcctctatgtctctttgtgtcgctttcattatgtctcttggtaactggcttcggttgtgtctctccgtgtgactattttgttctctctctccctctcttctctgtcttcagt

SEQ ID NO: 210 - DNA, 120 bp, Homo sapiens; identical to SEQ ID NO: 97

SEQ ID NO: 211 - DNA, 2603 bp, Homo sapiens; identical to SEQ ID NO: 132

SEQ ID NO: 212 - DNA, 585 bp, Homo sapiens
  modified_base (544)..(544): a, c, g, or t
  modified_base (552)..(553): a, c, g, or t
  modified_base (558)..(558): a, c, g, or t
aaacgtcgatacctaggattgtttatttaaaaatgcccaaaacacaaaaatagacttttaaggtaataatatatattactaaatatattatagtctacttataataattatatcgtcgttttcaatattacaaaaaaaggaagaaaaatacaagggaagcagacgacccaatatatataaatactataaaatcatattagaataaataaagtcgtcataaataaagggcccattgatttatgggtggggtttggcaacggctttggctacttgcttttggagggtaatttgagcaccaggattccccctcaggagaggttccagttaccaggagacactggaacctcaggtctataaaaactggaggggcagtgaaggcctattattcacagcacataagattctaggagacagatttgggcagggaagaggtgggggagagggttcattgcctcccttaaatatgctacaattttttttcccccaagaacctcggaagacactccatccccaccatcatgaatactgagcttgcacacttggngacctgcnncacgngaggcaggggagggggggtaatgcatt

SEQ ID NO: 213 - DNA, 1393 bp, Homo sapiens
ggggtatgaatccatgtcatcagtcatctcctgtattggatgatataagatcaggtcattcccttgaactttttcttcacctctcactggttgcaattatcagaaaaatgaaagttcaaaagaaaattttaacagtggcccatgatggctgcagttgggcacatcgataataaaacctaggcctataagctaccgctgacctcttacctgtgtaactggagtttgttaaatatttaacactgacaagtattggttataaacctccttatcacatgcagaactaagacaggatgaaatcagtcaccctccaccaggccttaagatgcctcacctttctccctacccactcaactgcacacataccctattttatatatagcatcaccaagcacccagcagaataaaaaaatgcaacaattgcttctctccctgcttctcttaccacctgtgccaaacggatactcctgttatatatactgtgccccaggtaacctactgtgggacacattctgggttgtactgagtttgtgttgttaagagttaagtccttaaacttggctcaaaataaatttaactgtgatttctctaatttttagtgcctactgtttcaccagacacctagagtcaatagtgtcctagaatctacggtgtccagggcttgagcaagatactttagtgaatataaacactaacgagaccttgccttttctcaagcctacaggatatcagcctatttgaaaagtgacactggctttacacccagaagcccacaaaatagaatgatgtaactgaattttttggtagctctctgggtaatttatgtggtgttagactcttgggtttgaaagaaagagactcgtgatcccattctggcatgacagaaacttcattggaagatgaggatgtttctctgggaaaatataaacaataagtgtgagcgttttagcagtgaatgtattaatattatgttggaaattgtattgctaaagagttaaagagaaaatagtgtaattaatttaaagaaaccttcaagaatttcagggtgcttttataaatgcaagttcctgaatatggtcaaacccaaaacgtcagtgaatttagaagagtagatgttttaaaagacctgattttaaaagaatgaccaaaaatagccaagtaaatagtcaaggaaatatataaaagaatatcaaagtaaactagaaaataacaaatggaacaatttgtaaaaatgaaagctataaataatgaaatggagaacaagacatagtgcaaaggatatataaagccaaaagttcatttttaaatggcaaaaacagagagagaagaagaaagagagagataaacttctggtaaggcatttattaaaagaaatacaagagaaagagaaaaaagc

SEQ ID NO: 214 - DNA, 623 bp, Homo sapiens
tacaggatatcagcctctttgaagagtgacatggcctttacagccagaagcccacaaaatagaatgaagtaactgaattttcggtagcactctgcacaatttatgtggtgttggactcatgggttttaaagaaagagacttgtgatcccattctgacaagccacaaacttcatgggacgatgtgtatctgtttatcaggggaaatataaacaataagtgtgagagttttagcagtgaatgtattaatatcatgttgaaaattttatcgttaaggagtaaaagagaaaatagtgtaactaattttaaggaaaccttcaaaaatttgggggtgcttttataaatgcaagttcctgaatatggccaaaacacaacacctcagtgaatttaaaagagtagaagttttaaaagacccgattttaaaagaatgttttaaaatagccaagtaaatattcaaagaattataaagagaatatcaaagtaaaccagaaaataactaatggaacaatttgtaaaaataaaagccataaatactgaaatgtagaaagttcattattaaatgggaaaaagagaaagagcagaagagagagataaacttttggtaaggcatttaaaggaaatagaag

SEQ ID NO: 215 - DNA, 166 bp, Homo sapiens; identical to SEQ ID NO: 87

SEQ ID NO: 216 - DNA, 418 bp, Homo sapiens
  modified_base (129)..(129): a, c, g, or t
  modified_base (185)..(185): a, c, g, or t
tataaaactataaacagacatttttaccctgaaaaagtagattactttataataaaattttgagttctaggaaaaatttgaaaaaaattggcatgcaattttaattttcaattatagaagagcactttncaataataaaagagtttgatattgcaaaagaaatcctatgcctagaaaccaattcnacatgactgctatttagggaaggcctaatctttgtaacttacaaagtgattgacagagtgggctctgggttcaaatcctgcctctgtcacttctagttgtggaatccttggcaagtgtcttaaactctttatgccattgagttattattcccatctgttattaaagagattaaagtatatgcctcagagggatgtttgagtgtaatgaaatgagataatccataaaaaaaaaa

SEQ ID NO: 217 - DNA, 544 bp, Homo sapiens
attcataagactcagagctacggccacggcagggacacgcggaaccaagacttggaaacttgattgttgtggttcttcttgggggttatgaaatttcattaatcttttttttttccggggagaaagtttgtggaaagattctcacagatatttcgtcattttctttgggaggaccgacttactttttttgggcttctttattactcccctccccccgtgggacccgccggacgcgtggaggagaccgtagctgaagctgattctgtacagcgggacagcgctttctgcccctgggggagcaacccctccctcgcccctgggtcctacggagcctgcactttcaagaggtacagcggcatcctgtgggggcctgggcaccgcaggaagactgcacagaaactttgccattgttggaacgggacgttgctccttccccgagcttccccggacagcgtactttgaggactcgctcagctcaccggggactcccacggctcaccccggacttgcaccttacttccccaacccggccatagccttggct

SEQ ID NO: 218 - DNA, 658 bp, Homo sapiens
  modified_base (628)..(628): a, c, g, or t
aaacagaacggtgggagctgatggctccgagtttggggcgaggtagaaactctccagtgccacttccgactttaagccttcctgttgccgtccactgtggcgggtttcttcctggggaacacgttttcgctcagtcgctcggcagcccgagcctgcggcagcggccaggcgcctgccccctgcgccgagctttcccctgcagaggcgctccactcccagaagcgccgcggctgcaccagagcgcctgagagcccccgcgcgtacccatccaggagcaaaactatgtcaggaatggaggtttgctaacccagaaaattcgaaggaacacattaaactggtggatgcagcagatgtaagcgctgtgcaaacatctcaagccagttcagatgttgctgtttcctcaagttgcagttaaaacagagccaatgagcagcagtgaaacagcttcaacgacagccgacgggtctttaaacaatttctcaggttcagcaattgggagcagtagtttcagcccacgaccaactcaccaattctctccaccacagatttacccttccaacagaccatacccacatattctccctaccccttcctcacaaactatggctgcatatgggcaaacacagtntaccacaggaatgcaacaagctacagccta

SEQ ID NO: 219 - DNA, 456 bp, Homo sapiens
cccgtcgctacatcccagcctggagggcatggcccagcggttgcataggtccctcggtttctgcagagcccgggagtcaccctattttggtaaaggtgaattgctcctccatgggtcgtgaaagaagatcatgtcagtggtggtgtttctgctcgtctcagaagggaagtctgtgacccgtgggagttgctggggaggggcctggtctgggccaggcctcttctttgggttgccccctcacacactctggtcatccaggaagcctctgtggccctcggaatgtgtaaaagatggtggttttaggagctgctggttttgcaactgagtgctgacggcttatttcttgttaatgattctgtcaaaagtgtcttagcgatgctcttcagcccttcatcacccacccaaaaaagattaaagtggattcttcatcagctattttaaaatcaaaaaaaaaaa

SEQ ID NO: 220 - DNA, 986 bp, Homo sapiens
gataaggggccctaatattgtttcttgtccatcaaaggacttcaaattagtagcttctgctatgcaataccccactgagataagagggttttttttttttgtcccttccttttaaccttggtggtattttacaaagatgaacacttgagcactgaagatgcttatgtcttttagtgcatgtaaatgtttgattctgcacggacaggcaagatgttaaattggtaaagtatatcaaattagctttaaaaataactttattacagttcctatctctgtcattttagaactgctctcatacttgctgtatgttggggatcagcaagtatagtcagccttctacttgagcaaaacattgatgtatcttctcaagatctatctggacagacggccagagagtatgctgtttctagccatcataatgtgtaagtgtttacattaaaaggctagttaatgctaaattgaggtttaaaataattataacagttacatctcacatatcaggggagatgtcatagttcagttcaggtagttttcgcgtggcagtgagttttagtcccctgcatcagccagaaatcagacaaaaagcaagacaagttagaagtaccaatgggtgcaggattctttatctcaggacttttaagacctttatccatagagatcccaacattgttcatttgatccaagtgtagcacctatgcatgggataaaaaatagtatcacatctttgatttttctgattagttatttgggtcttgaaatgtccagtttatcagaaagtcttgtactgtcttctggggactatgtcctagatactccttgaatttttcaggaaccaaaggggttcactaaatccaaggaagacggtcccttttatcaagtcagaagcaggagaaaaaaaaggacattgcaatcattctgttgtttccattgattctgctgctgcattgttgccactcaaactggtcctgctgccttaagagtcgacg

SEQ ID NO: 221 - DNA, 718 bp, Homo sapiens
gctcctgtgccccattgtcattctctgcctcttatcttttcttttttgacagggtctcactctgtcaccaggctggagtgcagtggctggatcatgagtcactgcaaccttgacctttcaggctcaagcatcctctcacctcagtctcctgactagctgcaggcatgaatcaatgtgcctggctaattgtcttatttttatgttatagagatggtggggcgggggggggtcttcgtttttcagactggtctcaaactactggttatagttttataactttctgtgccacactctgatgccccaaaatatctagcagagacaaacataaaaccccgaaaaaatgtatgctgacaattctgaagacatttctatttttatcttacaataattttaatgctagcttcttaaaaatttacttaagtaacgtgaatgtaaaaaatactttggacttatttacttaatctaggagtgttcttttatgtataagccaatttggtagtcacaacatataatgtaatacatgtgcatacacataaacacatctagatgtatatacacacaaagatccaaaagcttttaccttggaactctagccatgagatagtaatacagtttcaactgtctgcaaacatgtccacatggctgaactttgttagccttgataggtaatccagggaaggctgtgaaacaaattttaaataaaatgagtttctgtggc

SEQ ID NO: 222 - DNA, 615 bp, Homo sapiens
tggaaaggagtagctcctgttccatttctgggttccatgaccacttccgtgcggtctgtttcaggcctagtccctgtctgctcttttctctgcgctagctcctatcttccccttttccttagtgtcatagaattagtgggttgaaaggaagagatcttctagcccacactcagtacaggaatcccttccagatactgggcagtggggaaatgcattatgtgactctcatgactttagattcgaatgccagaattatgttgtattgagccacagttttctttccatgcaatttctacttgtgtttacttacttctaagaaaagcattacagaatttaatgaagcaaagaatgatctgtgaatcaagcagctcctagaaccaaaataggttcagagccgctctccttggttttttttgtcaacacgcagagcaagttggctacctcccttcatatgctcgcctcatagtattcaaagacagctatcatggccacattaaatcttggtttctttgtttgagacagggtgtcactctgtcacccaggctggattgcagtggtgcgatctcagttcactgcaactttcacctcctgggctcaagccatccttccacctag

SEQ ID NO: 223 - DNA, 615 bp, Homo sapiens; identical to SEQ ID NO: 222

SEQ ID NO: 224 - DNA, 2236 bp, Homo sapiens
ggtagacgcgatctgctggctactaccggccttccctggctgttaaaagcagatggtggctgaggctggttcaatgccggctgcctcctctgtgaagaagccatttggtctcagaagcaagatgggcaagtggtgccgccactgcttcgcctggtgcagggggagcggcaagagcaacgtgggcacttctggagaccacgacgattctgctatgaagacactcaggagcaagatgggcaagtggtgctgccactgcttcccctggtgcagggggagcggcaagagcaacgtgggcacttctggagaccacgacgattctgctatgaagacactcaggagcaagatgggcaagtggtgctgccactgcttcccctgctgcagggggagcggcaagagcaacgtgggcacttctggagaccacgacgactctgctatgaagacactcaggagcaagatgggcaagtggtgctgccactgcttcccctgctgcagggggagcggcaagaacaaagtgggcccttggggagactacgacgacagcgctttcatggagccgaggtaccacgtccgtcgagaagatctggacaagctccacagagctgcctggtggggtaaagtccccagaaaggatctcatcgtcatgctcaaggacactgacatgaacaagaaggacaagcaaaagaggactgctctacatctggcctctgccaatggaaattcagaagtagtaaaactcctgctggacagacgatgtcaacttaatatccttgacaacaaaaagaggacagctctgacaaaggccgtacaatgccaggaagatgaatgtgcgttaatgttgctggaacatggcactgatccgaatattccagatgagtatggaaataccgctctacactatgctatctacaatgaagattgagtctcactctgtttcccaggctggagtgcagtggtgtgatcacagctcactgcaacctcgacctcccgaagctcagatggtcctccaacctcaacctcagttgtttttttctttctttctttttatttttatttttatttttatttttttttagtagagatttggtttttgccatgtttctcaggctggtcttgaactcctgggctcaagcaattcatccccctcagcctcccaaagtgctaggattacaggtcatggcctcacaccactgttacttggtgtacatgagcaaaaacagcaagtggtgaaatttttaatcaagaaaaaagcaaatttaaatgcactggatagatatggaagaactgctctcatacttgctgtatgttgtggatcggcaagtatagtcagccttctacttgagcaaaacattgatgtatcttctcaagatctatctggacagacggccagagagtatgctgtttctagtcgtcataatgtaatttgccagttactttctgactacaaagaaaaacagatactaaaagtctcttctgaaaacagcaatccagaacaagacttaaagctgacatcagaggaagagtcacaaaggcttaaaggaagtgaaaatagccagccagaggaaatgtctcaagaaccagaaataaataagggtggtgatagaaaggttgaagaagaaatgaagaagcacggaagtactcatatgggattcccagaaaacctgactaacggtgccactgctgacaatggtgatgatggattaattccaccaaggaaaagcagaacacctgaaagccagcaatttcctgacactgagaatgaacagtatcacagtgatgaacaaaatgatactcagaagcaactttctgaagaacagaacactggaatattacaagatgagattctgattcatgaagaaaagcagatagaagtggctgaaaatgaattctgagctttctcttagttataagaaagaaaaagacctcttgcatgaaaatagtacgttgcaggaagaaattgtcatgctaagactggaactagacataatgaaacatcagagccagctaagagaaaagaaatatttggaggaaattgaaagtgtggaaaaaaagaatgataatcttttaaagggtctacaactgaatgagctcaccatggatgatgatactgccgtgctcgtcattgacaacggctctggcatgtgcaaggccggctttgcaggtgacgatgccccccgggctgtcttcccttccatcgtggggtgccccaggcaccagaacatgatggggggcatgcgtc

SEQ ID NO: 225 - DNA, 979 bp, Homo sapiens
atgggaatgatcttcttatcacagactgtacttggaatcctgggaatttctatcttatttaccattatctgtccttttacatcactgggtgcaggttaaggtccacagatttgatgatcagacacctaattgtagccaacacgttattcctcctccctagaggagtcccacagacaatggcagcttttgggtttaggcatttccggagtgattctggatgtaaatttcttttttgtgtccacagagttgtcaggggagtgtccattggcagcacctgcctcctgagtgtctcccaggccatcaccatcagccccaggagctcaggtgggcagagcttaaagggaacgcccccaagcacgctggctcctgtgtgttcctcagctggctcctccctggtcaatatcattgttctcatgcacgtgaccggcaagtggagcaacaaaaataccacgaagacaaaagatctgggatactgttctgctgctgatcacgagggcaccagagagtcgctgacgcggcactgctgtccttccctgatgtgatctgcctggggctcatgctctggggcagcagctccatcgtttgcatcctgcacaggcacaagcggcgggtccagcacattcataggaccagcgtgtcccccacatcctcccctgagtccggagctaccaaaaccatcctcctggtgagcacgtttgtgtccttttacactctctcttcacctttcaagtttgtttggctcttttgaataatcccagtcagctggtggtgaacatctctgcaatgatcagtgcaggtttcccaactgtcagccgctttcttctcatgagtggagactcctgtgtatccaagctttgctttgcttagataagtaacacaaaaccccctaatcttatcagaaatatgtgaattggacatgtttgtacaatgtttatgtttcttcattgatctctagagacccataaacacggttatgaaa

SEQ ID NO: 226 - DNA, 2545 bp, Homo sapiens; identical to SEQ ID NO: 193

SEQ ID NO: 227 - DNA, 899 bp, Homo sapiens
gaaatgggctgagtccctcttgctcacccttgacttggaaaaaccagtttctcttttattgtctgttactaatctctattctaaaaattcagctcaattctcaaccatactccaaactctctcttttccagctacctttactccctctccttcaattccactttcctctgcttactttttttttttttctgacagggtctcactttgtcgcccgggcaggagtgcagtggctcaatcttgggctcactgcagcctcaacctcccagaggcggggtttcaccatgttgcccagactggtcttgaactcctgagcttaagcaatccacctgcctcggcctcccaaagtgttgggatcacaggcgtgagccaccgcatccggcctcatgttctttttcattaaagagagaaatcaactattcaggaccggcccccacctttcctcaggagtcatttctgttccgcacaggcctgctgaactgggtgctttatataggacactgtcatctctcaagtacccatcttggagggtacggaccccacatgaggatttcagtggagtgaagttcaggaggcatggagctgacaaccatgaggcctcggcagccaccgccaccaccgccgccgccaccaccgtagcagcagcagcagcagcagcagcagcagcagcagcagcaagagtaactctgacttaggaatagagacagccagagagaaatgtgatcaatgaaggagacatctggagtgtgcgtgcttcttcagagggacgggtgatgggcagattggaaaaagcaccgcagatgggaaccttaatctttcttttctaaaattgatgctatgaaaatttgcgttttctgtaacttgtaaaaactaaaagttgcttgtctactgaaaaaaaaaaa

SEQ ID NO: 228 - DNA, 2165 bp, Homo sapiens
gcggccgccccggcggctcctggaaccccggttcgcggcgatgccagccaccccagcgaagccgccgcagttcagtgcttggataatttgaaagtacaatagttggtttccctgtccacccgccccacttcgcttgccatcacagcacgcctatcggatgtgagaggagaagtcccgctgctcgggcactgtctatatacgcctaacacctacatatattttaaaaacattaaatataattaacaatcaaaagaaagaggagaaaggaagggaagcattactgggttactatgcacttgcgactgatttcttggctttttatcattttgaactttatggaatacatcggcagccaaaacgcctcccggggaaggcgccagcgaagaatgcatcctaacgttagtcaaggctgccaaggaggctgtgcaacatgctcagattacaatggatgtttgtcatgtaagcccagactattttttgctctggaaagaattggcatgaagcagattggagtatgtctctcttcatgtccaagtggatattatggaactcgatatccagatataaataagtgtacaaaatgcaaagctgactgtgatacctgtttcaacaaaaatttctgcacaaaatgtaaaagtggattttacttacaccttggaaagtgccttgacaattgcccagaagggttggaagccaacaaccatactatggagtgtgtcagtattgtgcactgtgaggtcagtgaatggaatccttggagtccatgcacgaagaagggaaaaacatgtggcttcaaaagagggactgaaacacgggtccgagaaataatacagcatccttcagcaaagggtaacctgtgtcccccaacaaatgagacaagaaagtgtacagtgcaaaggaagaagtgtcagaagggagaacgaggaaaaaaaggaagggagaggaaaagaaaaaaacctaataaaggagaaagtaaagaagcaatacctgacagcaaaagtctggaatccagcaaagaaatcccagagcaacgagaaaacaaacagcagcagaagaagcgaaaagtccaagataaacagaaatcggtatcagtcagcactgtacactagagggttccatgagattattgtagactcatgatgctgctatctcaaccagatgcccaggacaggtgctctagccattaggaccacaaatggacatgtcagttattgctctgtctaaacaacattcccagtagttgctatattcttcatacaagcatagttaacaacaaagagccaaaagatcaaagaagggatactttcagatggttgtcttgtgtgcttctctgcatttttaaaagacaagacattcttgtacatattatcaataggctataagatgtaacaacgaaatgatgacatctggagaagaaacatcttttccttataaaaatgtgttttcaagctgttgttttaagaagcaaaagatagttctgcaaattcaaagatacagtatcccttcaaaacaaataggagttcagggaagagaaacatccttcaaaggacagtgttgttttgaccgggagatctagagagtgctcagaattagggcctggcatttggaatcacaggatttatcatcacagaaacaactgttttaagattagttccatcactctcatcctgtatttttataagaaacacaagagtgcataccagaattgaatataccatatgggattggagaaagacaaatgtggaagaaatcatagagctggagactacttttgtgctttacaaaactgtgaaggattgtggtcacctggaacaggtctccaatctatgttagcactatgtggctcagcctctgttaccccttggattatatatcaacctgtaaacatgtgcctgtaacttacttccaaaaacaaaatcatacttattagaagaaaattctgattttatagaaaaaaaatagagcaaggagaatataacatgtttgcaaagtcatgtgttttctttctcaatgagggaaaaacaattttattacctgcttaatggtccacctggaactaaaagggatactattttctaacaaggtatatctagtaggggagaaagccaccacaataaatatatttgttaatagtttttcaaaaaaaaaaaaaaaaaaaaaaaaaa

SEQ ID NO: 229 - DNA, 1239 bp, Homo sapiens
cggcgagggtcctgccgagggacccgttctgcgcccaggcaggctcgaagcacgcgtccctctctcctcgcagtccatggcgcggttcctgacactttgcacttggctgctgttgctcggccccgggctcctggcgaccgtgcgggccgaatgcagccaggattgcgcgacgtgcagctaccgcctagtgcgcccggccgacatcaacttcctggcttgcgtaatggaatgtgaaggtaaactgccttctctgaaaatttgggaaacctgcaaggagctcctgcagctgtccaaaccagagcttcctcaagatggcaccagcaccctcagagaaaatagcaaaccggaagaaagccatttgctagccaaaaggtatgggggcttcatgaaaaggtatggaggcttcatgaagaaaatggatgagctttatcccatggagccagaagaagaggccaatggaagtgagatcctcgccaagcggtatgggggcttcatgaagaaggatgcagaggaggacgactcgctggccaattcctcagacctgctaaaagagcttctggaaacaggggacaaccgagagcgtagccaccaccaggatggcagtgataatgaggaagaagtgagcaagagatatgggggcttcatgagaggcttaaagagaagcccccaactggaagatgaagccaaagagctgcagaagcgatatgggggcttcatgagaagagtaggtcgcccagagtggtggatggactaccagaaacggtatggaggtttcctgaagcgctttgccgaggctctgccctccgacgaagaaggcgaaagttactccaaagaagttcctgaaatggaaaaaagatacggaggatttatgagattttaatatttttcccactagtggccccaggccccagcaagcctccctccatcctccagtgggaaactgttgatggtgttttattgtcatgtgttgcttgccttgtatagttgacttcattgtctggataactatacaacctgaaaactgtcatttcaggttctgtgctctttttggagtctttaagctcagtattagtctattgcagctatctcgttttcatgctaaaatagtttttgttatcttgtctcttatttttgacaaacatcaataaatgcttacttgtatatagagataataaacctattaccccaagtgcaaaaaaaaaaaaaaaaaaaaaaaaaaaaaaaaaaaaaaaaaaaaaa

SEQ ID NO: 230 - DNA, 1403 bp, Homo sapiens
gagagcggtaggcgcgggagcgcggcccctccgaggtccgcccgcggccggggagctgcctggcacccgcggcttccaaaggggaaagaaagttgcgcccgcgccaggcgcagcgcgctcggcggacgcggcctttcgggcgaaagttaggaggggccgggctggcgggcgggcgggttccgggggctcctttccgcaccagcggcggtcgctccccgtgggcgggacctcgggcgtgatcgtcgaggagaccgcggctccctcacctgccggcttgttcctcggggtccgcggagcgagcccagctctcggcgcgtgtcggagtctcccagccccgcggccccgagcgcacgatgcgcggacccgggcaccccctcctcctggggctgctgctggtgctgggggcggcggggcgcggccgggggggcgcggagccccgggagccggcggacggacaggcgctgctgcggctggtggtggaactcgtccaggagctgcggaagcaccactcggcggagcacaagggcctgcagctcctcgggcgggactgcgccctgggccgcgcggaggcggcggggctggggccttcgccggagcagcgagtggaaattgttcctcgagatctgaggatgaaggacaagtttctaaaacaccttacaggccctctttattttagtccaaagtgcagcaaacacttccatagactttatcacaacaccagagactgcaccattcctgcatactataaaagatgcgccaggcttcttacccggctggctgtcagtccagtgtgcatggaggataagcagtgagcagaccgtacaggagcagcacaccaggagccatgagaagtgccttggaaaccaacagggaaacagaactatctttatacacatcccctcatggacaagagatttatttttgcagacagactcttccataagtcctttgagttttgtatgttgttgacagtttgcagatatatattcgataaatcagtgtacttgacagtgttatctgtcacttatttaaaaaaaaaacacaaaaggaatgctccacatttgacgtgtagtgctataaaacacagaatatttcattgtcttcattaggtgaaatcgcaaaaaatatttctttagaaacataagcagaatcttaaagtatattttcatataacataatttgatattctgtattactttcactgttaaattctcagagtattatttggaacggcatgaaaaattaaaatttcggtcatgttttagagacagtggagtgtaaatctgtggctaattctgttggtcgtttgtattataaatgtaaaatagtattccagctattgtgcaatatgtaaatagtgtaaataaacacaagtaataaatgaagtgtttgttataaaaaaa

SEQ ID NO: 231 - DNA, 468 bp, Artificial Sequence
  Description of Artificial Sequence: Synthetic polynucleotide
accaagccttccacgtgcgccttatagcctctcaacttcttgcttgggatctccaacctcaccgcggctcgaaatggaccccaactgctcctgcgccactggtggctcctgcacctgcactggctcctgcaaatgcaaagagtgcaaatgcacctcctgcaagaagagctgctgctcctgctgccccatgagctgtgccaagtgtgcccagggctgcatctgcaaaggggcatcagagaagtgcagctgctgtgcctgatgtccggacagccctgctcgaagatatagaaagagtgacctgcacaaacttggaattttttttccatacaaccctgacccatttactgtattttttttaatgaaatatgtgaatgataataaaagttgctgacttaaaaaaaaaaaaaaaaaaaaaaaaaaaaaaaaaaaaaaaaaaaaaaaaaaaaaaaaaaaaaaaaaaaaaaaaaa

SEQ ID NO: 232 - DNA, 468 bp, Homo sapiens; identical to SEQ ID NO: 231

SEQ ID NO: 233 - DNA, 86 bp, Homo sapiens
ttcctctataaagaataggtataggaaagactgaataaaaatggagggatatccccttggatttcacttgcattgtgcaataagca

SEQ ID NO: 234 - DNA, 242 bp, Homo sapiens
gaataaggaggtactcaacttgtttaaaattttcagctctgctcatgactgttgaatttcggtaatggtcaagggtgtctgtctggagtctgggagacccatgtaacgttctgtgtacactgagtcatagtactcccaccgggatacaggcgccacggctattccacacttgaacacgccacttcccgatcccaggaccattgaggtacgtacccttcatatgaccagccccaaattgcaat

SEQ ID NO: 235 - DNA, 172 bp, Homo sapiens
ggatgatgatatacctcatcgggtcagtgtgagaattgcgtgagttaaaatctgttaagtgcatacaactagcactggctcgcaggaagcactaaggaagtttatgctgctgttattgtccattgagtgttttttacatgcagaatgctgggtcaagccctgtaaggctgta

SEQ ID NO: 236 - DNA, 213 bp, Homo sapiens
ggcaatgtccaaagtcaaatatcacctaaactggttagattacttctacagctaataatattgcaggcactggcgccctctggtggttatgaagacaaattcttaatggctacttgacctacagcaaaagccatttctgtaccataaaaatttgttgtgcaatattagaattatcatatgtttcctacatctgacagcacctaaaatgtttga

SEQ ID NO: 237 - DNA, 144 bp, Homo sapiens
tggtccacatcactgaggaagtagaagaaaacaggacacaagatggcaagcctgagagaattgcccagctgacctggaatgaggcctaaaccacaatcttctcttcctaataaacagcctcctagaggccacattctattcttt

SEQ ID NO: 238 - DNA, 239 bp, Homo sapiens
tttaccaatcggtagagaagagacagtttaatatttgtgctgaaaatatgtttcagtatttttttcaatgaatgttaagagattgttctcactcccgccccatcttaatgtataaccaacaccaaacacgtggatcaacagaaaaggaaaatttcactcgtctaaacactttcaattttcagtttttattttatgttctatatacccagtcataaagtataagcatcagttgtcattaa

SEQ ID NO: 239 - DNA, 283 bp, Homo sapiens
ttcacctcccgattctaagaagagactgtccaagcaagttaggcttgcaggaagatatgacccagctgagaagccctcaggcctcgctggatggggttttctgtccatcctatgcagtatttgggaaagttcacaagaaactgagaagaaacctaaaaactgtggatagtggaaagatttttagattttttttttccttggggaaactggcaggcaatgggggttagggaggttggggcggtgggggctttcttgagttaaaggggcttatatgtgatgtcaa

SEQ ID NO: 240 - DNA, 253 bp, Homo sapiens
cagcctctgttaccccttggattatatatcaacctgtaaacatgtgcctgtaacttacttccaaaaacaaaatcatacttattagaagaaaattctgattttatagaaaaaaaatagagcaaggagaatataacatgtttgcaaagtcatgtgctttctttctcaatgagggaaaaacaattttattacctgcttaatggtccacctggaactaaaagggatactattttctaacaaggtatatctagtaggg

SEQ ID NO: 241 - DNA, 216 bp, Homo sapiens
taggagactccgtcgctccaattacttccgacttcctccctgtgaaaatgtggatttgcagagacccaatggtctgtgatcattgaaaaagaggaaagaagaaaaaatgtatgggtgagaggaaggaggatctccttcttctccaaccattgacagctaacccttagacagtatttcttaaaccaatccttttgcaatgtccagcttttaccccta

SEQ ID NO: 242 - DNA, 297 bp, Homo sapiens
tttagataatgttgtcaagaccaaaagcatggatgtcaagtgtcagtaaggattttgttttctaaaattttttcctgcatcagttcttctgagggccttgatgaaataacacagcagtttcttaaacaatttgaaacaaaatgagctctcctaccacctcactttttcatttccacactaatgtattatatgtaactacttggaaaaaataattattcaaatgcttcttcccacaaagaatatagatgatagtagatatattttattaataaaatggttcatgaatcggagactaac

SEQ ID NO: 243 - DNA, 294 bp, Artificial Sequence
  Description of Artificial Sequence: Synthetic polynucleotide
  modified_base (207)..(207): a, c, g, or t
gtttcccttacatttctttggagtcttttcaactgctgtggttttacttagaagtcagtgctttgcatatttgatttcctgagactgtttgaatagtctttctcagaaaactgtgccagtctggctgtgaacagctcttctccgaggggagctgaccagtagcctgctcgtgttggtatgcttggactggggttcccagcatgcccngtaatctctctcccaaacccccttatccggtccctgccccaatgacaatcatggccaatcttgccaccccttaaagaagagacaaca

SEQ ID NO: 244 - DNA, 103 bp, Homo sapiens
tttcttttactactatattacgttgttattattttgttctctatagtatcaatttatttgatttagtttcaatttatttttattgctgacttttaaaataagt

SEQ ID NO: 245 - DNA, 157 bp, Homo sapiens
gccataaactttccacttatgcagatgggcctgctcgtaagtcactgtcactgtgggttcccaactctgttcatgacacttccttccagcaccaaatgcttcccacccctctactcccactccccattcttcaaacccagctcaagttccagttcct

SEQ ID NO: 246 - DNA, 36 bp, Homo sapiens
caccttctccatttcacaccggtggtacaagaaatc

SEQ ID NO: 247 - DNA, 262 bp, Homo sapiens
atcttaacctatcaactttctgcccctccttcaaggcccagtataaatgccacctcctccatgaagccttccctaattccaccccaaacccccaccttcaacaatatttcaacgcttctgcaatgatgaaaaagaaacatagttgtagtacttagcctacctagaccagcaagcattcatttttagctcgctcattttttaccatgttttccagtctgtttaacttctgcagtgccttcactacactgccttacataaacca

SEQ ID NO: 248 - DNA, 146 bp, Homo sapiens
ggtgtcagttgacctcagtgaattctgtgatgtttctgagatgcagactcccgtgtagtttcagattcttggtccatggatgacaccacctgcccatgcttccttgaattaggctttcctaacctgaagcgccttcaaacttccaa

SEQ ID NO: 249 - DNA, 252 bp, Homo sapiens
tatccttttctggagagtagtctagaccaagccaattgcagaaccacattctttggttcccaggagagccccattcccagcccctggtctcccgtgccgcagttctatattttgcttcaaatcagccttcaggtttcccacagcatggcccctgctgacacgagaacccaaagttttcccaaatctaaatcatcaaaacagaatccccaccccaatcccaaattttgttttggttctaactacctccagaat

SEQ ID NO: 250 - DNA, 191 bp, Homo sapiens
caaccctatcccagagaccttgatgcttggcctcccaatcttgccctaggatacccagatgccaaccagacacctccttcttcctagccaggctatctggcctgagacaacaaatgggtccctcagtctggcaatgggactctgagaactcctcattccctgactcttagccccagactcttcattcagtg

SEQ ID NO: 251 - DNA, 108 bp, Artificial Sequence
  Description of Artificial Sequence: Synthetic polynucleotide
tgtaatccctgttactcgggggctgaggcacaagaatcacttgaactctggagagagaggttgcagtgagccgacatcagccactgcactcaagactctcgatctctc

SEQ ID NO: 252 - DNA, 62 bp, Homo sapiens
tgggagtgaccagaagaaatgacgcagaagtgaaatgaactttttataagcattcttttaat

SEQ ID NO: 253 - DNA, 240 bp, Homo sapiens
gaagagctacttcattcttttctgaagttgtgtgttgctgctagaaatagtcatttgtgaattatccaaattgtttaaattcacaattgaattagttttttcttcctttttgcttgaagcaaacagttgacaatttttaaccttttcattttatgtttttgtactctgcagactgaaaagacaaagtttatcttggccttactgtataaaggtgtgctgtgtccaccgttgtgtacagaa

SEQ ID NO: 254 - DNA, 172 bp, Homo sapiens
gggctgtgcatcaggcggtttgagaaatattcaattttcagcagaagccagaatttgaattccctcatcttttaggaatcatttaccaggtttggagaggattcagacagctcaggtgctttcactaatgtctttgaacttctgtccctctttgtgttcatggatagtccaa

SEQ ID NO: 255 - DNA, 206 bp, Homo sapiens
attcaaccatcatctgtcaagaaattaaaagaacaacaccctagagagaagtcatccacacacaatccacacacgcatagcaaacctccaatgcatgtacagaaacctgtgatatttatacccttgtaggaaggtatagacaatggaattgtgagtagcttaatctctatgtttctctccattttcattcctcctgcaactatttt

SEQ ID NO: 256 - DNA, 214 bp, Homo sapiens
gcgatgctgaggtaccggtgggacaggaggaggtctgctaggtcacatggaagaaagaccatggcatgggcctgtggcctgaaccctggggctctgtgatggagccagccagatcatggggaagtctgcctttcaaggagtgcctttgggaccttaaaggaattgaaaacaaggatgacgtacctaattaactgctgggaaagagttaacaatg

SEQ ID NO: 257 - DNA, 281 bp, Homo sapiens
aattcgccaatcatcccaccatataaccttcgattgtgcttctcaactccaccccataatttctcccagagaccatctatcaccttttccccaaagaagaaacaaaaccagttgcaccttaaaccatggatattttttcctcaggggctttaaatagtttcctatgcaacgtgtcttgtagcacaaataaaattctacaaaagttgcagtaaattttatttggatattttaacctgttaagtgtgtgtgtgttttctgtacccaaccagactttaaataaa

SEQ ID NO: 258 - DNA, 297 bp, Homo sapiens
tggtgccctgggaggccagctaggaagcaagggttggaggcaatgtgggatttcagacccagtagctgcccttcctgcctgatgtgggagctgaaccacagaaatcacagtcaatggatccacaaggcctgaggagcagtgtggggggacagacaggaggtggatttggagaccgaagactgggatgcctgtcttgagtagacttggacccaaaaaatcatctcaccttgagcccacccccaccccattgtttaatctgtagaagctaataaataatcatccctccttgcctagcaa

SEQ ID NO: 259 - DNA, 48 bp, Homo sapiens
ccttgcctagcataacagagaatcctttttttaacggtgatgcgctgt

SEQ ID NO: 260 - DNA, 249 bp, Homo sapiens
gtcaccatagacaccacaatgcgtggaggccgacttggcgttttttgcttctctcaagaaaacatcatctggtccaacctcaagtatcgctgcaatgacaccatccctgaggacttccaagagtttcaaacccagaatttcgaccgcttcgataattaaaccaaggaagcaatctgtaactgcttttcggaacactaaaaccatatatattttaacttcaattttctttagcttttaccaacccaaata

SEQ ID NO: 261 - DNA, 292 bp, Homo sapiens
agattttaaaaataggccggggatggtggcttatgcctgtaatcccagcactttgggaggccgaggcagacggatcacctaaggacaagagttcaagaccagcctggtcaacatggtgaaaccctgtctttactaaaaatacaaaaattagctgggcatggtggcatgcgcctatagtcccagctactcgggaggctgaggcaggagaatcacttgaacctgggaggtagaggttgcagtgagccgagatagtgccactgcactccagcctcggcatcagagtgagattctg

SEQ ID NO: 262 - DNA, 274 bp, Homo sapiens
aagacagaaaacttgcccaatactgagaagcaacttgcattagagagggaactgttaaatgttttcaacccagttcatctggtggatgtttttgcaggttactctgagaattttgcttatgaaaaatcattatttttagtgtagttcacaataatgtattgaacatacttttaatcaaaggtgctatgtccttgtgtatggtactaaatgtgtcctgtgtacttttgcacaactgagaatcctgcagcttggtttaatgagtgtgttcatgaaa

SEQ ID NO: 263 - DNA, 284 bp, Artificial Sequence
  Description of Artificial Sequence: Synthetic polynucleotide
cttgtgtatgcagggctatgcacctgcaggcacgtgtgtatgcactccccgcttgtgtttacacaagctgtggggtgttacgcatgcctgcttttttcacttaataatacagcttggagagatttttgtatcacattataaatcccactcgctctttttgatggccacataataactactgcataatatggatacgccttatttgatttaactagttccctaatgatggacttttaagttgtttcctttttttttcttttttgctactgcaaacgatgctataa

SEQ ID NO: 264 - DNA, 240 bp, Artificial Sequence
  Description of Artificial Sequence: Synthetic polynucleotide
tacttaatctaggagtgttcttttatgtataagccaatttggtagtcacaacatataatgtaatacatgtgcatacacataaacacatctagatgtatatacacacaaagatccaaaagcttttaccttggaactctagccatgagatagtaatacagtttcaactgtctgcaaacatgtccacatggctgaactttgttagccttgataggtaatccagggaaggctgtgaaacaaatt

SEQ ID NO: 265 - DNA, 237 bp, Homo sapiens
caacaacaaaaaatgtttaagccgggcgcggtggctcacatctgtaatcccagcactttgggagtccaaggagggggatcgcttgagtccaggagtttgagaccagcctggacaacatggtgaaaccccgtctttacaaaaaatacaaaaattagccatgcatggtggctcatgcctgtagtcccagctacttgggaggctgaggcaggaggatcacttaagcccagaaggcagagg

SEQ ID NO: 266 - DNA, 241 bp, Homo sapiens
gttattgtcactctgagaactctccaataacaatttcttttccacagttaacaacacagctgttacacctcccttcctttttttcacagtgaacctgtattcagctattctcactctgagaactctccaataacaatttcttttccacagttaacaacaaagttctgtttttaaatgaagagattaagttctttttaaatgcctaaaggcatattctgacaacttttctacttctttaact

SEQ ID NO: 267 - DNA, 241 bp, Homo sapiens
ggctgagcaccactgagcatttccattccagttggcttcttgggtttgctagctgcatcactagtcatcttaaataaatgaagttttaacatttctccagtgatttttttatttcacctttgaagatactatgttatgtgattaaataaagaacttgagaagaacaggtttcattaaacataaaatcaatgtagacgcaaattttttggatgggcaatacttatgttcacaggaaatgctt

SEQ ID NO: 268 - DNA, 247 bp, Homo sapiens
ctggtcctgggtaatggctgagcaccactgagcatttccattccagttggcttcttgggtttgctagctgcatcactagtcatcttaaataaatgaagttttaacatttctccagtgatttttttatttcacctttgaagatactatgttatgtgattaaataaagaacttgagaagaacaggtttcattaaacataaaatcaatgtagacgcaaattttttggatgggcaatacttatgttcacag

SEQ ID NO: 269 - DNA, 280 bp, Homo sapiens
tccatggaagggctcttccggcagggatgcaggctcacagcgccctggggctggacaccaccggccggagcatggcggacagcacacacggcccggggcgggaaccttggaaactttacacagatggggagctcagccattccacgtgtgctttcgctcagcacaatgcttactacaaacccacgtgtacttccttccagctggttgctttttattgttgctgtcttaaactccaaagttttaaggtgaatttattgaaacgtacgaaaatgctcagttc

SEQ ID NO: 270 - DNA, 287 bp, Homo sapiens
gaatgtttcagagcgcagggccgttctccctcgtgtcctctggacccacccgccccttcctgccctgtttgcgcagggacatcacccacatgccccagctctcggaccctgcagctctgtgtcccaggccacagcaaaggtctgttgaacccctccctccattcccagttatctgggtcctctggattcttctgtttcttgaatcaggctctgctttccccctagccactacaggcagcctctgacagtgccgctttacttgcattctgcagcaattacatgtgtcc

SEQ ID NO: 271 - DNA, 287 bp, Homo sapiens
tctaccatttactaattatgtgactttggtcaaatatttgacccctctgagacttggatttcacatctggaaatgtgaagaataaacactacttaatagaattattgtgcaaattaaattaagtgtaaaaagcttggttcacagtaggtggcaaataaatatgtacttcctttaaggaaatgtgtcattttctttaacatagtttatattcataaggagacaacacacaaacacatacacaatcaatcaacaaaaatgtgatacagtagattattaagcaccttgct

SEQ ID NO: 272 - DNA, 299 bp, Artificial Sequence
  Description of Artificial Sequence: Synthetic polynucleotide
tctaccatttactaattatgtgactttggtcaaatatttgacccctctgagacttggatttcacatctggaaatgtgaagaataaacactacttaatagaattattgtgcaaattaaattaagtgtaaaaagcttggttcacagtaggtggcaaataaatatgtacttcctttaaggaaatgtgtcattttctttaacatagtttatattcataaggagacaacacacaaacacatacacaatcaatcaacaaaaatgtgatacagtagattattaagcaccttgctttgattaaaaag

SEQ ID NO: 273 - DNA, 66 bp, Homo sapiens
gttcatctgtgttgatacctgtagttgtagttcatctgttttcattactatgtgcctttcccctgt

SEQ ID NO: 274 - DNA, 161 bp, Homo sapiens
tttggctgagcattatgtttttgaggttcatctgtgttgatacctgtagttgtagttcatctgttttcattactatgtgcctttcccctgtaagtagtcccccccttatttgcaggggatacagggcccccagaaggtgcctgaaacttcagatagtacca

SEQ ID NO: 275 - DNA, 233 bp, Homo sapiens
cacatcattgtcaagttcccacaggtatttaatacaaggctgtttaaggtcaaagaaagacacttgtttcttacctatttaggaagagcacagtatgatccagcaaaacctaactacatctctttggacaaactagtatctattcctgatgaaatattttgtgaagagattgccaaagcatcagtacaggactttgaaaaattcttaaaaacgctttagatttttatgtatgt

SEQ ID NO: 276 - DNA, 32 bp, Homo sapiens
ggccagtggcgatttcgatgcttgcgtccaag

SEQ ID NO: 277 - DNA, 109 bp, Homo sapiens
aaaccaaggcacataatcgtgtgtgagtgtgtgtgccagtgtgtgtacatgcatccacatatgtgtgctctcatgtaaatgattaaaaagcctggaacttatgatgttt

SEQ ID NO: 278 - DNA, 124 bp, Homo sapiens
gtatcatttaggtacaaaccaaggcacataatcgtgtgtgagtgtgtgtgccagtgtgtgtacatgcatccacatatgtgtgctctcatgtaaatgattaaaaagcctggaacttatgatgttt

SEQ ID NO: 279 - DNA, 117 bp, Homo sapiens
tttccttgtccacagtggttgacagttataaagtagttatatgtgtatactatttagaagacgcctaattgtggattataaaatgtgcacattttctatcacttgtttccaataaag

SEQ ID NO: 280 - DNA, 94 bp, Artificial Sequence
  Description of Artificial Sequence: Synthetic oligonucleotide
ataaatggccattgtctttgtctcagtaaagtgtaggtggacaatcttcctgtgatatgtagtgacattggtcatgtagctagataattatggt

SEQ ID NO: 281 - DNA, 278 bp, Homo sapiens
taaatggccattgtctttgtctcagtaaagtgtaggtggacaatcttcctgtgatatgtagtgacattggtcatgtagctagataattatggtaattgtgacaattaaagagaaataaattattgattatccttcagaaaaattatcaaggagtgttttattttccttgtccacagtggttgacagttataaagtagttatatgtgtatactatttagaagacgcctaattgtggattataaaatgtgcacattttctatcacttgtttccaataaag

SEQ ID NO: 282 - DNA, 281 bp, Homo sapiens
gaagccacagagcaggcgctcgaccagacccatcaggggcgaggagggcacggaaacctgtgccgagatgggggcaagaggcccaggcagccaccagcacagagaagaggagatccccagagtcagggagggcagagggtggcagcgagggcagggcagccgcccccgctcccagccaggcagaaggcccccaccagcaccacacccatccccagcagcctgtccttgggagagggcgtcacccggtcagagactccaaataaaccggttcttgtcaaggc

SEQ ID NO: 283 - DNA, 231 bp, Artificial Sequence
  Description of Artificial Sequence: Synthetic polynucleotide
ccgtagctgaagctgattctgtacagcgggacagcgctttctgcccctgggggagcaacccctccctcgcccctgggtcctacggagcctgcactttcaagaggtacagcggcatcctgtgggggcctgggcaccgcaggaagactgcacagaaactttgccattgttggaacgggacgttgctccttccccgagcttccccggacagcgtactttgaggactcgctcagc

SEQ ID NO: 284 - DNA, 256 bp, Homo sapiens
ataaacctgtaccttagtgaatattttagattagggtaatacagacactgaagattatttgagaactgtacttggcataaactcatttcattgttataaaaaacaacttctattccagatgcctttgagtgttcaaggatgctctgtgatcagtattatttatcatctccagaattaaagcttacacaagtgaatggtaagttataagtaaaatatattttaacctatggaaaattctgtgttctcctaatattat

SEQ ID NO: 285 - DNA, 261 bp, Homo sapiens
ataaacctgtaccttagtgaatattttagattagggtaatacagacactgaagattatttgagaactgtacttggcataaactcatttcattgttataaaaaacaacttctattccagatgcctttgagtgttcaaggatgctctgtgatcagtattatttatcatctccagaattaaagcttacacaagtgaatggtaagttataagtaaaatatattttaacctatggaaaattctgtgttctcctaatattattgctt

SEQ ID NO: 286 - DNA, 183 bp, Homo sapiens
tgacttaggaatagagacagccagagagaaatgtgatcaatgaaggagacatttggagtgtgcgtgctttttcagagggacgggtgatgggcagattggaaaaagcaccgcagatgggaaccttaatcttttttttttaaaattgatgctatgaaaatttgcgttttctgtaacttgtaaaaa

SEQ ID NO: 287 - DNA, 38 bp, Homo sapiens
gagagaaatcaactattcaggaccggcccccacctttc

SEQ ID NO: 288 - DNA, 65 bp, Homo sapiens
gtgctttatataggacactgtcatctctcaagtacccatcttggagggtacggaccccacatgag

SEQ ID NO: 289 - DNA, 290 bp, Homo sapiens
accgtaaagtactgcgcgacaatatccagggcatcaccaagccggccatccggcgccttgctcgccgcggcggcgtgaagcgcatctccggcctcatctacgaggagactcgcggggtgctgaaggtgttcctggagaacgtgatccgggacgccgtgacctatacagagcacgccaagcgcaagacggtcaccgccatggatgtggtttacgcgctcaagcgccagggccgcaccctctacggtttcggtggttgagcgtccttttctaccaataaaaggcccttttca

SEQ ID NO: 290 - DNA, 169 bp, Homo sapiens
gcagtcccaagtctgaagatgcaggcagtaaaacaaagaaattaaaatgctgtgcaatgagtgagtcacagtgctgtaagaccacattgcctaggcagccatgcccttggaagtggtgatgtctaagtgagaactgatagattagtaagaggttgctctggccaggcac

SEQ ID NO: 291 - DNA, 179 bp, Homo sapiens
tattgctatgagataataagccacatatgaatgttgtatacaactttagggtttacatttaatcctgaagtgttacctcctttcatgtctatttacactattttcccatttactaagtggggagggggtctccttatatagtgcttcatcgttaataagtcaatacctgttgttcctgg

SEQ ID NO: 292 - DNA, 254 bp, Homo sapiens
ttttgattcaaaagcatcttaccaataaggataaatatcatatacatcgttatgaaaatattgctatgagataataagccacatatgaatgttgtatacaactttagggtttacatttaatcctgaagtgttacctcctttcatgtctatttacactattttcccatttactaagtggggagggggtctccttatatagtgcttcatcgttaataagtcaatacctgttgttcctgggatgttcttttttgtgc

SEQ ID NO: 293 - DNA, 103 bp, Homo sapiens
tgggaccacagtatgtcgcaggcattactaatttgaaaaagtgctcaacctcccccctcctggaagcctgtgaattcctcaggaagtaaaaccgaagaagatg

SEQ ID NO: 294 - DNA, 259 bp, Homo sapiens
tgcgcacctccccttgagtggagtgcctctcatgatccttgacgaggagagagagcttgaaaagctgtttcagctgggccccccttcacctgtgaagatgccctctccaccatgggaatccaatctgttgcagtttccttcaagcattctgtcgaccctggatgttgaattgccacctgtttgctgtgacatagatatttaaatttcttagtgcttcagagtttgtgtgtatttgtattaataaagcattctttaacag

SEQ ID NO: 295 - DNA, 108 bp, Homo sapiens
ttaaaaacttggtgcatgttggctgggcacagtggctcacgcttgtaatcccagcactttgggaggccgaggcaggtggatcacaagttcagtggttctagaccagcc

SEQ ID NO: 296 - DNA, 236 bp, Homo sapiens
gaaaccaatcaagataaaggacagtgaagtaatccgtaccttgtgttttgttttgatttaataacataacaaataaccaacccttccctgaaaacctcacatgcatacatacacatatatacacacacaaagagagttaatcaactgaaagtgtttccttcatttctgatatagaattgcaattttaacacacataaaggataaacttttagaaacttatcttacaaagtgtattt

SEQ ID NO: 297 - DNA, 274 bp, Homo sapiens
ctgactctgggttcgttggggacatgagattttattttttgtgagtgagactgagggatcgtagatttttacaatctgtatctttgacaattctgggtgcgagtgtgagagtgtgagcagggcttgctcctgccaaccacaattcaatgaatccccgacccccctaccccatgctgtacttgtggttctctttttgtattttgcatctgaccccggggggctgggacagattggcaatgggccgtcccctctccccttggttctgcactgttgc

SEQ ID NO: 298 - DNA, 240 bp, Homo sapiens
gcccatccctgaccatggttttggctctcccaccccgccgttccctgcgcttcatttcatgaggatttctttatgaggcaaatttatattttttaatatcggggggtggaccacgccgccctccatccgtgctgcatgaaaaacattccacgtgccccttgtcgcgcgtctcccatcctgatcccagacccattccttagctatttatccctttcctggtttccgaaaggcaattatatc

SEQ ID NO: 299 - DNA, 260 bp, Homo sapiens
ggcagggaacctcatagtatcttatataatatacttcatttctctatctctatcacaatatccaacaagcttttcacagaattcatgcagtgcaaatccccaaaggtaacctttatccatttcatggtgagtgcgctttagaattttggcaaatcatactggtcacttatctcaactttgagatgtgtttgtccttgtagttaattgaaagaaatagggcactcttgtgagccactttagggttcactcctggcaataaa

SEQ ID NO: 300 - DNA, 111 bp, Homo sapiens
gttaaactaaacttctttactgctgatatgtttcctgtattctagaaaaatttttacactttcacattatttttgtacactttccccatgttaagggatgatggcttttat

SEQ ID NO: 301 - DNA, 156 bp, Homo sapiens
gcattggttgattaaagtttaggtaccatccaggctggtctagagaagtctttggagttaaccatgctctttttgttaaagaagagagtaatgtgtttatcctggctcatagtccgtcaccgaaaatagaaaatgccatccataggtaaaatgctg

SEQ ID NO: 302 - DNA, 253 bp, Artificial Sequence
  Description of Artificial Sequence: Synthetic polynucleotide
gcatggctgggaacccaagtccaagcataccaacacgagcaggctactgtcagctcccctcggagaagagctgttcacagccagactggcacagttttctgagaaagactattcaaacagtctcaggaaatcaaatatgcaaagcactgacttctaagtaaaaccacagcagttgaaaagactccaaagaaatgtaagggaaactgccagcaacgcaggcccccaggtgccagttatggctataggtgctaca

SEQ ID NO: 303 - DNA, 79 bp, Homo sapiens
tttgaatgtctttcactccttttaaggataaactcctttatggtgtgactgtgtcttattcatctatacttgcagtggg

SEQ ID NO: 304 - DNA, 219 bp, Homo sapiens
gtgccttccaaacctgagaatatatgcttttggaagttaaaatttaaatggcttttgccacatacatagatcttcatgatgtgtgagtgtaattccatgtggatatcagttaccaaacattacaaaaaaattttatggcccaaaatgaccaacgaaattgttacaatagaatttatccaattttgatctttttatatttttttaccacacctggaaaca

SEQ ID NO: 305 - DNA, 234 bp, Homo sapiens
gtgccttccaaacctgagaatatatgcttttggaagttaaaatttaaatggcttttgccacatacatagatcttcatgatgtgtgagtgtaattccatgtggatatcagttaccaaacattacaaaaaaattttatggcccaaaatgaccaacgaaattgttacaatagaatttatccaattttgatctttttatatttttttaccacacctggaaacagaccaatagacattt

SEQ ID NO: 306 - DNA, 101 bp, Homo sapiens
gcagactcctcttgcaaggcgtacctccaaacataattgattcatatttgcgagacttacactcaagcaatcctgaggaatactgagggagggcctggcta

SEQ ID NO: 307 - DNA, 75 bp, Homo sapiens
gtttcagcgatttttcaggtagatggttttgatttgtctgttttccttttggtcctctctaggtgggctctcctt

SEQ ID NO: 308 - DNA, 164 bp, Homo sapiens
cagtgtgtttatccgtgcatcatgaaggaccctcatacggctgacgtgccttggctgatgcgaataacactgcagcaagcgtgggagtgcagatagctcttggaaatacccatttccttcagacgcatactcagaggtaggattgctggattgtttggtcattt

SEQ ID NO: 309 - DNA, 208 bp, Homo sapiens
ttgtgccccctgactggcttgtggggtctttctctcaccatgcatggcctgtggctctgtcagcaaacgttttctgcaaaaggccacctagtaagtgttttaggcattgtgtgccattattgtttctgttgtgatgaatcacctttgccattgtagcacaaaagcagatgtcaatacattggcaaatggctgtgactatgtttcaata

SEQ ID NO: 310 - DNA, 66 bp, Homo sapiens
ttgcataataggcaacctctagcgattaccataattttgctcattgaaggctatctccagttgatc

SEQ ID NO: 311 - DNA, 283 bp, Artificial Sequence
  Description of Artificial Sequence: Synthetic polynucleotide
tgttcatttccaattgattctctacttttcccttttttgtattatgtgactaattagttggcatattgttaaaagtctctcaaattaggccagattttaaaacatgctgcagcaagaggaccccgctctcttcaggaaaagtgttttcatttctcaggatgcttcttacctgtcagaggaggtgacaaggcagtctcttgctctcttggactcaccaggctcctattgaaggaaccacccccattcctaaatatgtgaaaagtcgcccaaaatgcaaccttga

SEQ ID NO: 312 - DNA, 213 bp, Homo sapiens
cagacccctgggtacatggtggatgattttaaatcaccctagtgtgctgagaccttgagaataaagtgtgtgattggtttcatacttgaagacggatataaaggaagaatatttcctttatgtgtttctccagaatggtgcctgtttctctctgtgtctcaatgcctgggactggaggttgatagtttaagtgtgttcttaccgcctcctttt

SEQ ID NO: 313 - DNA, 253 bp, Homo sapiens
atgtcccccatcatgtggcccaactctcctggcctggccatctccctccccagaaacagtgtgcatgggttattttggagtgtaggtgacttgtttactcattgaagcagatttctgcttccttttatttttataggaatagaggaagaaaggtcagatgcgtgcccagctcttcaccccccaatctcttggtggggaggggtgtacctaaatatttatcatatccttgcccttgagtgcttgttagagagaa

SEQ ID NO: 314 - DNA, 197 bp, Homo sapiens
gtgtgttgctgctagaaatagtcatttgtgaattatccaaattgtttaaattcacaattgaattagttttttcttcctttttgcttgaagcaaacagttgacaatttttaaccttttcattttatgtttttgtactctgcagactgaaaagacaaagtttatcttggccttactgtataaaggtgtgctgtgtccac

SEQ ID NO: 315 - DNA, 240 bp, Homo sapiens; identical to SEQ ID NO: 253

SEQ ID NO: 316 - DNA, 123 bp, Homo sapiens
tttgaggacaaacagatttgtcagctgtcagggtgcagtgggacgtcagagactatgtggtccatcgccttcattgtgtaaatgaggacacagactggcttggtcgcagtgactgtggtgtcc

SEQ ID NO: 317 - DNA, 219 bp, Homo sapiens
aactcctagtacttagaaatacacgtatggttaatgttcagtccaacaaaccacacacagtaaatgtttattaatagtcatggttcgtattttaggtgactgaaattgcaacagtgatcataatgaggtttgttaaaacgatagctatattcaaaatgtctatatgtttatttggacttttgaggttaaagacagtcatataaacgtcctgtttctgtt

SEQ ID NO: 318 - DNA, 122 bp, Homo sapiens
gaataggctctgctaacgtgatgagacaaactgaaaattattgcgagcattgactataattatgcagtacgttctcaggatgcatccaggggttcattttcatgagcctgtccaggttagtt

SEQ ID NO: 319 - DNA, 152 bp, Homo sapiens
atgctgataaaaataccagtgttattaccgtatgtaaatcttgtgtcattttctttcaagtgactgaactggcctttgcttaaacacttgacttctcaggaaacaaaaagctaactccgggtgtggggtaaattgagaatcctgtggctggc

SEQ ID NO: 320 - DNA, 233 bp, Homo sapiens
aggctgggaagcatctcaagatctttccagggttatacttactagcacacagcatgatcattacggagtgaattatctaatcaacatcatcctcagtgtctttgcccatactgaaattcatttcccacttttgtgcccattctcaagacctcaaaatgtcattccattaatatcacaggattaacttttttttttaacctggaagaattcaatgttacatgcagctatgggaa

SEQ ID NO: 321 - DNA, 282 bp, Homo sapiens
tgaattgatgtgttccttaaaggatgggcaggaaaacagatcctgttgtggatatttatttgaacgggattacagatttgaaatgaagtcacaaagtgagcattaccaatgagaggaaaacagacgagaaaatcttgatggcttcacaagacatgcaacaaacaaaatggaatactgtgatgacatgaggcagccaagctggggaggagataaccacggggcagagggtcaggattctggccctgctgcctaaactgtgcgttcataaccaaatcatttcat

SEQ ID NO: 322 - DNA, 174 bp, Homo sapiens
ctaaatcgcatcatgccaacttgtgactttgagactattcatcaagaatgaggatatagtagccatgacatagcttgagctatagcctttaattccttactttggctatgggtggagggtgagtttgaagaggttttgattttcttgtaacctgggaaagccatgaccttgtgc

SEQ ID NO: 323 - DNA, 179 bp, Homo sapiens
ggtttcctggttccactgctactgacccagaggggaatgagggctgagttatgaaaagataacttcatgaagacttaactggcccagaagctgattttcatgaaaatctgccactcagggtctgggatgaaggcttgtcagcacttccagtttagaacgcaatgtttctagagacatat

SEQ ID NO: 324 - DNA, 137 bp, Homo sapiens
ttagatttcatccaggtaacgttgagagtaatgtcaggatctcaaatggaaaacggaagttcctattttttcaagcccttttcatggggtctgggggtgggactctcggcctggctgtgtgtaatgttaacttaata

SEQ ID NO: 325 - DNA, 118 bp, Homo sapiens
gaaagctccggtattattctttgatagaaatccaataggaagaattttaaatcgtttctccaaagacattggacacttggatgatttgctgccgctgacgtttttagatttcatccag

SEQ ID NO: 326 - DNA, 149 bp, Homo sapiens
tttgggtaagcacctatttaagtgtcttaacaatttttctattgagtactctgggtttttgttttgtttttcttactgatttgtagaattctttatgtattttgaattgcagataccttccttctgtactaatgcttatctttttagcc

SEQ ID NO: 327 - DNA, 213 bp, Homo sapiens
tttgggtaagcacctatttaagtgtcttaacaatttttctattgagtactctgggtttttgttttgtttttcttactgatttgtagaattctttatgtattttgaattgcagataccttccttctgtactaatgcttatctttttagccctgtaatattgtgttttcataaacatacttatcaatcttttcctttatggtcattgatttttgt

SEQ ID NO: 328 - DNA, 191 bp, Artificial Sequence
  Description of Artificial Sequence: Synthetic polynucleotide
ttttccacttgtataatcagcatatattatctttttgattaaaaaccaagaaagaaaaaattaatttttttctagagaaattttcctgcatctcaccttaaaaaggtttttttcaaaattgcatcgattttcaatactgaaagaaacgtggtatactatggaatcagactaggtgaatgtatttccaagta

SEQ ID NO: 329 - DNA, 300 bp, Homo sapiens
cactgattaccccaaagggtaggaatggaggagaggagggcaaaggaggtgagaggttattaacttcttaaaatcatattggatttttccacttgtataatcagcatatattatctttttgattaaaaaccaagaaagaaaaaattaatttttttctagagaaattttcctgcatctcaccttaaaaaggtttttttcaaaattgcatcgattttcaatactgaaagaaacgtggtatactatggaatcagactaggtgaatgtatttccaagtaaattgcagcatatttcattctttcc

SEQ ID NO: 330 - DNA, 119 bp, Homo sapiens
gctgctgtgagggatcttggagcttccctgtagcccaccttccccttgcttcatgtttgtagaggaaccttgtgccggccaggcccagtttccttgtgtgatacactaatgtatttgct

SEQ ID NO: 331 - DNA, 216 bp, Homo sapiens
aatatctaaatatgtctcacatatttatataatcctcaaatatactgtaccattttagatattttttaaacagattaatttggagaagttttattcattacctaattctgtggcaaaaatggtgcctctgatgttgtgatatagtattgtcagtgtgtacatatataaaacctgtgtaaacctctgtccttatgaaccataacaaatgtagctttt

SEQ ID NO: 332 - DNA, 206 bp, Homo sapiens
taatcctcaaatatactgtaccattttagatattttttaaacagattaatttggagaagttttattcattacctaattctgtggcaaaaatggtgcctctgatgttgtgatatagtattgtcagtgtgtacatatataaaacctgtgtaaacctctgtccttatgaaccataacaaatgtagctttttaaagtccattgtattgtt

SEQ ID NO: 333 - DNA, 252 bp, Homo sapiens
gctatactcttcactaggattccctatatatatactatattatatgcctgttatagatatctagatatttactatagtgcagaagcaacaaaaagaaacactttttttctgagattatgttttatctagcaaatttgtaaataaacagagtaaaactataattttaaattaattgtatataatatcagttttcatttaactttccaggcttttaaaattacttttagtgctttctatggttattaaaagact

SEQ ID NO: 334 - DNA, 291 bp, Artificial Sequence
  Description of Artificial Sequence: Synthetic polynucleotide
ccattttataagatttctctccatatatatttctataactgctatactcttcactaggattccctatatatatactatattatatgcctgttatagatatctagatatttactatagtgcagaagcaacaaaaagaaacactttttttctgagattatgttttatctagcaaatttgtaaataaacagagtaaaactataattttaaattaattgtatataatatcagttttcatttaactttccaggcttttaaaattacttttagtgctttctatggttattaaaagac

SEQ ID NO: 335 - DNA, 218 bp, Homo sapiens
ctcctgaaacgtaggtgagaacaaagtgatggagtgagacattgtggcctggaagtctttcagacacccactcagagaagtcaagtttaaagtggatgttcttcagagaatttttcatttctgaaaatgtgttttgcttatagaatataacagagttgactagaaagagagaaacaactgcatactaatcttttaaagcctttaacagttgcttttaa

SEQ ID NO: 336 - DNA, 262 bp, Homo sapiens
tttacttgtaaacagcattagttgcagtcctgaaattttaatattattaggttttcatttttttttatttgaaaagtttttaattttattgtaatttatttgaaacaggtgttatatagaaatatattgctgaattcctaacatttctagttacatttttaattacattgatttcatgttaaatccacttatgtcagaatatattctgtataatatctgtctcttgaagtttgatgatacttgctttatggcataataaaga

SEQ ID NO: 337 - DNA, 253 bp, Homo sapiens
tttacttgtaaacagcattagttgcagtcctgaaattttaatattattaggttttcatttttttttatttgaaaagtttttaattttattgtaatttatttgaaacaggtgttatatagaaatatattgctgaattcctaacatttctagttacatttttaattacattgatttcatgttaaatccacttatgtcagaatatattctgtataatatctgtctcttgaagtttgatgatacttgctttatggca

SEQ ID NO: 338 - DNA, 175 bp, Homo sapiens
atccagatagaaggctgcatacccaaagaacgaagctgacactgcagggtcctgagtaaatgtgttctgtataaacaaatgcagctggaatcgctcaagaattttatttttttaaatccaacagcccatatttgatgagtattttgggtttgttgtaaaccaatgaacatttgct

SEQ ID NO: 339 - DNA, 205 bp, Homo sapiens
aacaacagatattctggctggcctgcagagatccagatagaaggctgcatacccaaagaacgaagctgacactgcagggtcctgagtaaatgtgttctgtataaacaaatgcagctggaatcgctcaagaatcttatttttctaaatccaacagcccatatttgatgagtattttgggtttgttgtaaaccaatgaacatttgct

SEQ ID NO: 340 - DNA, 198 bp, Homo sapiens
gaaatgttagtatctcaattacaccaactgtgcaaatgaactttgataaaatagaaataatttacattggcctttgtgaaatctggggaagagctttaggattttagtagatggatactgaatactcaggcccacttaaattattaatgtatacattgtgtttttgtctttatgctatgtacagagaaatgtgataat

SEQ ID NO: 341 - DNA, 52 bp, Homo sapiens
ataatttgaaggttggcagaccagttgcgctgattactcttagagaagaaga

SEQ ID NO: 342 - DNA, 264 bp, Homo sapiens
actaagttccaattttgttgctgaattgcttctgtgagttcacttttcagttttaaggaagaataatatttgctacatatttcacaggggtttttatgaaggtaaatttaccagattaataaaaatttatgaatattaaaattatcattaataatataaaacacttatttgagattaaattaaatttttcatgagcccctctttggcaggaactctgtttaattctttgtatttatcccagctttttaaatggtggctgtaaca

SEQ ID NO: 343 - DNA, 270 bp, Homo sapiens
aatatggttagttccagagtgcaaattacagaaggaagctacttgtttaaaattccatacacgtttgcagttttttgtacacatttggatactttgaaagatgacagattgttaaatccattcaatggtaaagaaactcaccatttggagattgagtttacttgttaatgaatgactagcccaattatccttataaattgaatatggtgaccaaatgctttgatatcatactactctgcctttgtgggcacatatgtagacactactaaa

SEQ ID NO: 344 - DNA, 198 bp, Homo sapiens
gtttgacatatggtatttcatttaaaccttctgtgatcctttgaagagtgtcctccaatttttcccattttaacagatgataaaactcacagaagggcctatggttatatagctagtaaaagtggcagagtccgttgaacttgaattcagattggggaatgctttaacagttggtatccagcagctacaggacttaat

SEQ ID NO: 345 - DNA, 281 bp, Homo sapiens
atgtgctatgtactaagtgtttgacatatggtatttcatttaaaccttctgtgatcctttgaagagtgtcctccaatttttcccattttaacagatgataaaactcacagaagggcctatggttatatagctagtaaaagtggcagagtccgttgaacttgaattcagattggggaatgctttaacagttggtatccagcagctacaggacttaatatttttcagtgttgtttcctcatctttaaattgaagatattaaagctcactttgtaaaattgcaa

SEQ ID NO: 346 - DNA, 218 bp, Homo sapiens
tcatggtggagtagacacctaggatacaatttaggcatggccccactttcaaaaagggtcccaaatatgagattccagctgtatcaccaatgatatcacccattgaaactcaggcagaatgaagagaacacattcaccatcagttacatgctggcagaagtcaaccctgaatcaatgctttataattcctgtactgatcttgtgagtagaacaacagt

SEQ ID NO: 347 - DNA, 42 bp, Homo sapiens
tgacgtcagccatgtacaggatccacaggggtggtgtcaaat

SEQ ID NO: 348 - DNA, 219 bp, Homo sapiens
ttcctgtagtactcctcttttagatcctaagtctcttacaaaagctttgaatactgtgaaaatgttttacattccatttcatttgtgttgtttttttaactgcattttaccagatgttttgatgttatcgcttatgttaatagtaattcccgtatgtgttcattttattttcatgctttttcagccatgtatcaatattcacttgactaaaatcactca

SEQ ID NO: 349 - DNA, 213 bp, Artificial Sequence
  Description of Artificial Sequence: Synthetic polynucleotide
ttaagcctctttattatagttccccctacattttggttcacatgccactgttatgttgaagaaactgggtcctttgtcttctggataccgttttacaaacatacttgttttcatttaataaatggctaaatttctttctatgtcaataattatacacatcattattttaaatcaccacatcccattgtgtggatagactatcatttataaagc

SEQ ID NO: 350 - DNA, 299 bp, Homo sapiens
gagaaatgacaaaaccagccaggtgtgatggctcacacctgtcatcccaccaccttgggaagcagaggtgggaggatggcttgagcccgggagtttgagaccaatgtggccaacacagagagaccttgttctacaaaaataattttaaaaattagcctggtgtggtgtcaagcacctctagtcccagctactgagaggctgaaataggaggattgcttgatcccagaaggttgaagctgcagtgagctatgattgtaccactacactacagcctaggtgacaccgaaagacccttcctc

SEQ ID NO: 351 - DNA, 294 bp, Artificial Sequence
  Description of Artificial Sequence: Synthetic polynucleotide
aagagactacagagtcaaagctcatttttaaaggagtaggacagagttgtcacaggtttttgttgttgtttttattgcccccaaaattacatgttaatttccatttatatcagggattctatttacttgaagactgtgaagttgccattttgtctcattgttttctttgacataactaggatccattatttcccctgaaggcttcttgttagaaaatagtacagttacaaccaataggaacaacaaaaagaaaaagtttgtgacattgtagtagggagtgtgtaccccttactc

SEQ ID NO: 352 - DNA, 216 bp, Homo sapiens
gaagagagtctgagccctcctctacaccatgtgagggcacagagagagagcagccatcaacaagctgagagaggaggactgagaatgaaacctacctcgccagaaccttgtcatatcccttcccggtttccaaacgagtgagaaatcaatttctgttgtgtaagctactcagtgtatgaaactttgttatggcagccagagcagattaatgcatgc

SEQ ID NO: 353 - DNA, 232 bp, Homo sapiens
gaagagagtctgagccctcctctacaccatgtgagggcacagagagagagcagccatcaacaagctgagagaggaggactgagaatgaaacctacctcgccagaaccttgtcatatcccttcccggtttccaaacgagtgagaaatcaatttctgttgtgtaagctactcagtgtatgaaactttgttatggcagccagagcagattaatgcatgcttcttggactttgttt

SEQ ID NO: 354 - DNA, 261 bp, Homo sapiens
tggaggcaatgtgggatctcagacccagtagctgcccttcctgcctgatgtgggagctgaaccacagaaatcacagtcaatggatccacaaggcctgaggagcagtgtggggggacagacaggaggtggatttggagaccgaagactgggatgcctgtcttgagtagacttggacccaaaaaatcatctcaccttgagcccacccccaccccattgtctaatctgtagaagctaataaataatcatccctccttgcctagc

SEQ ID NO: 355 - DNA, 148 bp, Homo sapiens
tggcccagctccccaagaaagcctcagccattcactgcccccagctcttctccccaggtgtgttggggccttggcctcccctgctgaaggtggggattgcccatccatctgcttacaattccctgctgtcgtcttagcaagaagtaaa

SEQ ID NO: 356 - DNA, 182 bp, Homo sapiens
agtgattctgtgaaaaggacagtgaagccagctattttacccccaggctggattttttttttttttttttttttttttaccgagtacacagagtacccaagtgaagagaacgtcatgagtgtaagtgcaaatcagtggaaggagcggcaaactgggacatgcagaattgaatttgctcaaaa

SEQ ID NO: 357 - DNA, 277 bp, Homo sapiens
cagggcccctcttgctgtttttacctttgttccttggggcctagtacccagcaagcacccaaatgggggaggttttgggatgagaggaggaaacgtgtatacctgtaacatctggtggctcttcccccagaagtttgtgttcatacataattgttttccacgctggatcataatgtgacgtgcagttctgccctgtgctggggagccacatgaagcttcccctggctaacttgctaccccgcagcaatcccagtgtggccgtctgcttgctaaaaaa

SEQ ID NO: 358 - DNA, 203 bp, Homo sapiens
ctgcccacagtctttccgtgtgattgtctttgaatctgaatcagccagtctcagatgccccaaagtttcggttcctatgagcccggggcatgatctgatccccaagacatgtggaggggcagcctgtgcctgcctttgtgtcagaaaaaggaaaccacagtgagcctgagagagacggcgattttcgggctgagaaggcagta

SEQ ID NO: 359 - DNA, 294 bp, Homo sapiens
caagaaactacaaatcaagaccacactgaggctgggtgtggtggctcatgcctgtaatcccagcactttgggaggctgaagtgggcaaatcacttggacaggagttcaagaccagcctgggcaacatggtgaaaccctgtctttactaaaaatacaaaaagttagctgggcatggtggtacacacctgtaatccctgttactcgggggctgaggcacaagaatcacttgaactctggagagagaggttgcagtgagccgacatcagccactgcactcaagactctcgatctctc

SEQ ID NO: 360 - DNA, 217 bp, Homo sapiens
agtcgccatgagaacttcctaccttctgctgtttactctctgcttacttttgtctgagatggcctcaggtggtaactttctcacaggccttggccacagatctgatcattacaattgcgtcagcagtggagggcaatgtctctattctgcctgcccgatctttaccaaaattcaaggcacctgttacagagggaaggccaagtgctgcaagtgagct

SEQ ID NO: 361 - DNA, 249 bp, Artificial Sequence
  Description of Artificial Sequence: Synthetic polynucleotide
tggttttggcataatagctgcatttccagacctgacctttggccccaaccacaagtgctccaagccccaccagctgaccaaagaaagcccaagttctccttctgtccttcccacaacctccctgctcccaaaactatgaaattaatttgaccatattaacacagctgactcctccagtttacttaaggtagaaagaatgagtttacaacagatgaaaataagtgctttgggcgaactgtattcctttta

SEQ ID NO: 362 - DNA, 191 bp, Homo sapiens
ctactccttacagtctctagaattaaatgtactcatttagacaacatattaaatgcatattttagccactttagagaaacctcataggcacagagtttccaagattaattttaagaatatcttcacgaacttgaccctcctactccacattgcaacatttccatcagacagcatttcaattccagtattat

SEQ ID NO: 363 - DNA, 284 bp, Homo sapiens
gaccaacaggagagagctcttgagtgggctagtgactccccctgcagcctggtggagatggtgtgaggagcgaagagccctctgctctaggatttgggttgaaaaacagagagagaagtggggagttgccacaggagctaacacgctgggaggcagttgggggcgggtgaactttgtgtagccgaggccgcaccctccctcattccaggctcattcattttcatgctccattgccagactcttgctgggagcccgtccagaatgtcctcccaataaaactccat

SEQ ID NO: 364 - DNA, 269 bp, Homo sapiens
gaagagtagatgttttaaaagacctgattttaaaagaatgaccaaaaatagccaagtaaatagtcaaggaaatatataaaagaatatcaaagtaaactagaaaataacaaatggaacaatttgtaaaaatgaaagctataaataatgaaatggagaacaagacatagtgcaaaggatatataaagccaaaagttcatttttaaatggcaaaaacagagagagaagaagaaagagagagataaacttctggtaaggcatttattaaaaga

SEQ ID NO: 365 - DNA, 259 bp, Homo sapiens
tgaggccgggaggatgcgtgcaggtggcggggagacagaggggcgatggcccagtttcttttgggctgaaaatggtctaaagttgactgtggtgatggctgtacaactttgaatatgctgaaaactcgaattacacacttcagttgggcgaactgtactccatgtgaattacctctcgatggttctctcctgggctcaggcgcttctcccaccttggcctcctgagtagctggaactaccattcatgtgcggaaataaa

SEQ ID NO: 366 - DNA, 233 bp, Homo sapiens
cgtagtagctgttcaactcctagtacttagaaatacacgtatggttaatgttcagtccaacaaaccacacacagtaaatgtttattaatagtcatggttcgtattttaggtgactgaaattgcaacagtgatcataatgaggtttgttaaaacgatagctatattcaaaatgtctatatgtttatttggacttttgaggttaaagacagtcatataaacgtcctgtttctgtt

SEQ ID NO: 367 - DNA, 113 bp, Homo sapiens
attttttcctatgtatacatgcctatgagaaagtttagtttgtaaattaggcccactgagagatgaacaataatgaataataaaatagaacaattatagcactatattgtaat

SEQ ID NO: 368 - DNA, 227 bp, Homo sapiens
gttagttgtatgagtctgttttcacgctgctgataaagacatacctgagactgggcaatttacaaaagaagaggtttagtggacttacagttccatgtggctggggagacctcacaatcatgacagaaggcaaggaggagaaagtcacgtggatggcagcaggcaaagagagagcttgtgcaggcaaactcttatttttaaaagcatcagatatcgcgtgaaccccg

SEQ ID NO: 369 - DNA, 284 bp, Homo sapiens
ttgccatatgttaaataaggtgaacagtaaagaagatcttgaaaacacagcctttctctggccatgaacagctatgtatacttaagcttgtattttggaaggaaaacatatttactttacaaaaatcattgaggatacaaaccatttaaaagaagaccaatcaatgtatttatttgctcatttgttcattcattcaaaggacatttgctaaatgccctgatgtgccagaaacatggggacagagaatataagataaagagtccagctggaagcaaatgctaaca

SEQ ID NO: 370 - DNA, 296 bp, Homo sapiens
atgaatcctacattttgccatatgttaaataaggtgaacagtaaagaagatcttgaaaacacagcctttctctggccatgaacagctatgtatacttaagcttgtattttggaaggaaaacatatttactttacaaaaatcattgaggatacaaaccatttaaaagaagaccaatcaatgtatttatttgctcatttgttcattcattcaaaggacatttgctaaatgccctgatgtgccagaaacatggggacagagaatataagataaagagtccagctggaagcaaatgctaa

SEQ ID NO: 371 - DNA, 277 bp, Homo sapiens
actagcatttgttttcgtatctagtattatttttgaagaagagtctggaaaatgcactctggcaaaggttaccaagaatttaagcctttttgcggggggtggagggggggcgttgatatgtgcattataaattatcatttaagaaaccgtccaagaaaaatgccgcgtcgttacatgacctcgatctttctttctcccctgcaatcctacacggcaataaaataattagtgttttagttaagtcaaatttttgaatgtctatgttaaactaagtttt

SEQ ID NO: 372 - DNA, 237 bp, Homo sapiens
tggagagtcacatgtcactagcatttgttttcgtatctagtattatttttgaagaagagtctggaaaatgcactctggcaaaggttaccaagaatttaagcctttttgcggggggtggagggggggcgttgatatgtgcattataaattatcatttaagaaaccgtccaagaaaaatgccgcgtcgttacatgacctcgatctttctttctcccctgcaatcctacacggcaataaa

SEQ ID NO: 373 - DNA, 282 bp, Homo sapiens
taaatgcaagttcctgaatatggccaaaacacaacacctcagtgaatttaaaagagtagaagttttaaaagacccgattttaaaagaatgttttaaaatagccaagtaaatattcaaagaattataaagagaatatcaaagtaaaccagaaaataactaatggaacaatttgtaaaaataaaagccataaatactgaaatgtagaaagttcattattaaatgggaaaaagagaaagagcagaagagagagataaacttttggtaaggcatttaaaggaaata

SEQ ID NO: 374 - DNA, 91 bp, Homo sapiens
ccaaaccctgtatgtactatttattttttcctatgtatacatgcctatgagaaagtttagtttgtaaattaggcacactgagagatgaaca

SEQ ID NO: 375 - DNA, 294 bp, Homo sapiens
cacattcataatctaacttgctcatttaactaataatacatcgcaaaatttttccatatccacaaataaccatctaatctacatgacaatcttcaatcgtggagtagtattccagcctatggatgccccataattaatcagttccttgttaaacatgtagattgttttgatgcttttgctagcatataatgctatgttaaagagttctatgcattcgtttctgagcacatgaatacttttttcctttgagttatttctaaagagaaatttctaaataaagggtatgcccctctt

SEQ ID NO: 376 - DNA, 58 bp, Homo sapiens
caaagtacacatgagtgtaaagatgacactccaggctggtgtggtggccagcactttg

SEQ ID NO: 377 - DNA, 240 bp, Homo sapiens
tctaatttccacctttgtgaaagtcccttctgtcccaacgtcaagggttgatacagtctggggagagcttttacatgcatttcagcctgaattgatgtcaagacatcaacagtctctcccttccgaacttccttttagtttcctgacaaaagcatcacctgtctttctccagaaatgaatcgttggggaccctacaggtagtactggctgtgcctgtgaatttgtgatcattgaagacaa

SEQ ID NO: 378 - DNA, 224 bp, Homo sapiens
tttccacctttgtgaaagtcccttctgtcccaacgtcaagggttgatacagtctggggagagcttttacatgcatttcagcctgaattgatgtcaagacatcaacagtctctcccttccgaacttccttttagtttcctgacaaaagcatcacctgtctttctccagaaatgaatcgttggggaccctacaggtagtactggctgtgcctgtgaatttgtgatc

SEQ ID NO: 379 - DNA, 61 bp, Homo sapiens
taataatagctctcacggagatttttttttgatacatcgtcttaaccagaagagttctctg

SEQ ID NO: 380 - DNA, 256 bp, Homo sapiens
ggttaataatagctctcacggagatttttttttgatacatcgtcttaaccagaagagttctctgtataatttatttcttaaaaataattgttttgtgtttgttttgggtatttttagaagcttttgctcaagtcctaacataatctccagtaggagattttagtctgtcagttcatgtatgtatatgatagtcatattgtcatattgtctttttaaattcctttttatgttcacttttttctctgtacaataatag

SEQ ID NO: 381 - DNA, 181 bp, Homo sapiens
actggcccaggcttatctgcctgaaagggcaactgtttgaggtagagggaactggcagaataggagggggggaatcttcctgggagaaagtaaaaagaattctaggtggagaggagatcaagatgtgaaccaaacacatgtcttctaaattactataggaaatgttggaaaggactttaga

SEQ ID NO: 382 - DNA, 265 bp, Homo sapiens
gaagatatgtatctccaggttttcattttcctttttctcatgaaatggtattcaaatcgtgcactttgaaatgccacagaggaggaggtttatccgagctacgtgatgggtcaaatgaacttaaatttgaaacatgtttaaatttgcccttttgtttccttttcattaattactggaattgccgtgagtccgttgctctgtgaacgtttctctttctttgaacattcaggatatggtgttttgtaagtgatttaacagccagctt

SEQ ID NO: 383 - DNA, 172 bp, Homo sapiens; identical to SEQ ID NO: 235

SEQ ID NO: 384 - DNA, 281 bp, Homo sapiens
gcttggatgtaaaacgtaatagaaagatagaaaagggagagctaggaaatggactataaaaaccaatttctacatttaaattaagcttacaaataagaacttgacagctagcagaattggtttccattagacattactcccaggagctatattacatagtaaatgaatatttttcattatacatcctacatgacccattcataaatggctatttacaaagctgttttactactaacttaaaaaaataggaactttgaattaccctctgtgctacttttatt

SEQ ID NO: 385 - DNA, 292 bp, Artificial Sequence
  Description of Artificial Sequence: Synthetic polynucleotide
tagtctttggtgcttggatgtaaaacgtaatagaaagatagaaaagggagagctaggaaatggactataaaaaccaatttctacatttaaattaagcttacaaataagaacttgacagctagcagaattggtttccattagacattactcccaggagctatattacatagtaaatgaatatttttcattatacatcctacatgacccattcataaatggctatttacaaagctgttttactactaacttaaaaaaataggaactttgaattaccctctgtgctacttttatt

SEQ ID NO: 386 - DNA, 132 bp, Homo sapiens
ccagggaagggtgagttctattgtcaccactgtttctgctgctgctaccttctcaatctagaaggtggtccattccattcctccttttccagatgagagatctgaggccagagttcccaaactatactttaa

SEQ ID NO: 387 - DNA, 131 bp, Homo sapiens
ccagggaagggtgagttctattgtcaccactgtttctgctgctgctaccttctcaatctagaaggtggtccattccattcctccttttccagatgagagatctgaggccagagttcccaaactatacttta

SEQ ID NO: 388 - DNA, 91 bp, Homo sapiens
ccaaaccctgtatgtactatttattttttcctatgtatccatgcctatgagaaagtttagtttgtaaattaggcacactgagagatgaaca

SEQ ID NO: 389 - DNA, 245 bp, Homo sapiens
gctccaactgttggacaaaataaagaggggattgtgccagaccttgtgttttttgattcgaactttgccaaggcctggaacgctgaagaataatacttttatttttcttttctttctaattttattttactttttatttttctttccaaaaagcattaagaggtttttgtttgtctgtttcctttatcctcttggtaaaattttagcatatttaacatataagatttaatgtttgggtgatacaa

SEQ ID NO: 390 - DNA, 245 bp, Artificial Sequence; identical to SEQ ID NO: 389
  Description of Artificial Sequence: Synthetic polynucleotide

SEQ ID NO: 391 - DNA, 192 bp, Homo sapiens
gatcataacatatttctgtgctctccctatagctgtgagcccctgaagtctggctttcagaatataaatgtattcacgaccccgaactcgtgtcatgccttaaagaatcatcatagtcaactcttttaacagcattattttaaaatgttaaatgtcactttggggatgtcattaacgatcacacatatgtaa

SEQ ID NO: 392 - DNA, 277 bp, Homo sapiens
ctttaatataggaattatgggccaggtgcagtggcttatgcctataatcccagcacttctggaggcagagacaggtggatcgcttgagctcaggaattcaagaccagcttggtcaacatggcaagaccctgtctctacaaaaaaatacaaaaattagctgggcatgatggtatgtgcttgtggtcccagctacttgggaggctgaggtgggaggatcacttgagcccgagaggtcaaggctacagtgagctgtgattgcacagctatactccagcct

SEQ ID NO: 393 - DNA, 45 bp, Homo sapiens
gaagtttgagactgctgagctctgatcggatctgagtgagctctg

SEQ ID NO: 394 - DNA, 243 bp, Homo sapiens
aataaatacgtgttttttaggccaggtgtggtggttcacgcctgtaatcccagcacttttggaggctgaggagggcggatcacctgaggtcgtgagttcaagaccagcctggccaacatggtgaaaccccatctctactgaaaacacaaaaattagctgggtgtggtggtgcacgcctgtaatcccatatactccagaggctgaggcatgagaatcacctcaactcgggagccgagatcgcac

SEQ ID NO: 395 - DNA, 37 bp, Homo sapiens
acctttagaaatatctcgttagaggccagacgcggtg

SEQ ID NO: 396 - DNA, 272 bp, Homo sapiens
aaccctcacgcaagtctagagccaaaactgtagaccttgatcccggcactctctatgtccactcagtttgacatcgtcacacctaaatgctgtctggtcccctgcacaataatggagagtactcctgaccccagtgacagctagccctcccctgtgatggtggtggtggatactaatacagttctgtacgatgtgaaggatgtgtctttgctatttcttgtctattttaacccgtctgcttctaaatgatgtctagctgcttaccaacttta

SEQ ID NO: 397 - DNA, 248 bp, Homo sapiens
atggacattgagatactatcattaacattaggaccttagaattttgggtattgtaatctaaagtatgttattacaaaacaaacaaacaaacaaaaaacccatgtgttaaaatactcagtgctaaacatggcttaatcttattttatcttctttcctcaatataggagggaagatttttccatttgtattactgcttcccattgagtaatcatactcaaatgggggaaggggtgctccttaaatatata

SEQ ID NO: 398 - DNA, 147 bp, Homo sapiens
aaatacaaggccctgataaaattgatatctatccttatatttttctccctttttcccgtgccactttttcttaaattatttcccagttagtattatcatatgtttgtacccgtcacagttttcatagtgctttcaaatacacctttt

SEQ ID NO: 399 - DNA, 198 bp, Homo sapiens
aagttttcagaaaatcttgaggttaaacatctctctctctttttttaaaatacaaggccctgataaaattgatatctatccttatatttttctccctttttcccgtgccactttttcttaaattatttcccagttagtattatcatatgtttgtacccgtcacagttttcatagtgctttcaaatacacctttttgat

SEQ ID NO: 400 - DNA, 220 bp, Homo sapiens
ctcaatttgagtaatctgatcgttctttctagctaatggaaaatgattttacttagcaatgttatcttggtgtgttaagagttaggtttaacataaaggttattttctcctgatatagatcacataacagaatgcaccagtcatcagctattcagttggtaagcttccaggaaaaaggacaggcagaaagagtttgagacctgaatagctcccagatttc

SEQ ID NO: 401 - DNA, 71 bp, Artificial Sequence
  Description of Artificial Sequence: Synthetic oligonucleotide
tattgcccggctcctagaatttatttatttcctgacttacagcaagcgagttatcgtcttctgtattttgt

SEQ ID NO: 402 - DNA, 84 bp, Homo sapiens
tattgcccggctcctagaatttatttatttcctgacttacagcaagcgagttatcgtcttctgtattttgtagactttctaaat

SEQ ID NO: 403 - DNA, 64 bp, Homo sapiens
tttctccaaagacattggacacttggatgatttgctgccgctgacgtttttagatttcatccag

SEQ ID NO: 404 - DNA, 242 bp, Homo sapiens
tgcatgtgtgcccatacatgcttatgaggaggtcagtgtgtgaggggaatcaggaagtctcttttttatttttaaatgaaatcaagtaaaacttaaccttggcttcaaaaatatctctcaaatactgtaaacaatacctttgatactttttagaaagagattatggccaggcgtagtggctcacgtctgtaatcccagaactttgggaggccgaggtgggcagaccacctgaactcaggaat

SEQ ID NO: 405 - DNA, 250 bp, Homo sapiens
ggtcagtgtgcatgtgtgcccatacatgcttatgaggaggtcagtgtgtgaggggaatcaggaagtctcttttttatttttaaatgaaatcaagtaaaacttaaccttggcttcaaaaatatctctcaaatactgtaaacaatacctttgatactttttagaaagagattatggccaggcgtagtggctcacgtctgtaatcccagaactttgggaggccgaggtgggcagaccacctgaactcaggaat

SEQ ID NO: 406 - DNA, 218 bp, Homo sapiens
tttattatacaccaaaggttaacagtgaatctctgtgtgatctctttttttttctttttgcctatctgcatcttctcacttgccaaaaaatgaatatatgtttatgtgtgtatattacttgtgtcacaaaaaaccctaaagtagacagtaaaagaacttgtcaatcgcctttggaaggcaatgaaacacttaataaactctcaataacagaagcgtaa

SEQ ID NO: 407 - DNA, 252 bp, Homo sapiens
aagtgtctgattttattatacaccaaaggttaacagtgaatctctgtgtgatctctttttttttctttttgcctatctgcatcttctcacttgccaaaaaatgaatatatgtttatgtgtgtatattacttgtgtcacaaaaaaccctaaagtagacagtaaaagaacttgtcaatcgcctttggaaggcaatgaaacacttaataaactctcaataacagaagcgtaaaaatgaaatgtaaacctccaatt

SEQ ID NO: 408 - DNA, 259 bp, Homo sapiens
tttgcactataataccctccactgaagtctcactgcaactgcttttaattatatgtgaagagaaactagccctttgctaaaatagttgcatgtttcacgggccagtgagtcatttagtcatacacttaagaactttccacctttcaagtgtttatcatcacctcggatttcacggcctaatgccagtcaatttcatggggcatagaagccctgtacgtattagtttgggccattattgtatcagtcttgtttattccca

SEQ ID NO: 409 - DNA, 228 bp, Homo sapiens
aaagattaaattgctattgctgtagtaagagaagctctttgtatctgaacatagttgtatttgaaatttgtggttttttaatttatttaaaattggggggagggcatgggaaggatttaacaccgatatattgttaccgctgaaaatgaactttatgaaccttttccaagttgatctatccagtgacgtggcctggtgggcgtttcttcttgtacttatgtggttttt

SEQ ID NO: 410 - DNA, 291 bp, Homo sapiens
  modified_base (259)..(259): a, c, g, or t
tcctctcagtgcagtagatgcggaagttagcagacacttgttcgaactgtgtatttgtcaaattttgcatgagaagatcacaattttagtgactcatcagttgcagtacctcaaagctgcaagtcagattctgatattgaaagatggtaaaatggtgcagaaggggacttacactgagttcctaaaatctggtatagattttggctcccttttaaagaaggataatgaggaaagtgaacaacctccagttccaggaacntcccacactaaggaatcgtaccttctcagagt

SEQ ID NO: 411 - DNA, 216 bp, Homo sapiens
  modified_base (124)..(124): a, c, g, or t
gagtgatttaattgtgggatcctcctgaagcagatgaataggaacagctatttaaattgatgtaattttattatgacctccttcacagtggttttcaggtaaccctgctttcttagttaataangaggttctgtgacccaggtaaccttgatgcacagatgagataatgtggggattcactgatgcaaaatcagaggcaatcctttcataagtaga

SEQ ID NO: 412 - DNA, 208 bp, Artificial Sequence
  Description of Artificial Sequence: Synthetic polynucleotide
gaataaattttctgctcacgatgagtttagtgtgtaaagtttagagacatctgactttgatagctaaattaaaccaaaccctattgaagaattgaatatatgctacttcaagaaactaaattgatctcgtagaattatcttaataaaataatggctataatttctctgcaaaatcagatgtcagcataagcgatggataatacctaat

SEQ ID NO: 413 - DNA, 280 bp, Homo sapiens
agatgtttcagcttgaagaaccaaaacagaaggaatatgtacaaagaataaattttctgctcacgatgagtttagtgtgtaaagtttagagacatctgactttgatagctaaattaaaccaaaccctattgaagaattgaatatatgctacttcaagaaactaaattgatctcgtagaattatcttaataaaataatggctataatttctctgcaaaatcagatgtcagcataagcgatggataatacctaataaactgccctcagtaaatccatggtta

SEQ ID NO: 414 - DNA, 257 bp, Homo sapiens
cttgtcctccaagttatgggggatcttgtactgacaatctgtgttttccaggagttacgtcaaactacctgtactggtttaaataagtttaccttttcctccaggaaatataatgatttctgggaacatgggcatgtatatatatatatggagagagaattttgcacatattatacatattttgtgctaatcttgttttcctcttagtattcctttgtataaattagtgtttgtctagcatgtttgtttaatccttt

SEQ ID NO: 415 - DNA, 110 bp, Homo sapiens
agcacccctatcaaccccctattgtagtaaacttggaaccttggaaatgaccaggccaagactcaagcctccccagttctactgacctttgtccttaggtgtgaggtcca

SEQ ID NO: 416 - DNA, 187 bp, Homo sapiens
ttcctccaaaacaaacgacagcaacgaaaactccttaatcagaacactgatccaatgaggaatggagcttgtttctgtgacccaggagaacttagtgcaagactacaggagttaacagatggccagctccttattttttaatgtagaataactcctgagtttatatcaaatcctgaagaaataagcc

SEQ ID NO: 417 - DNA, 287 bp, Homo sapiens
aatgaaaagatccaccccagttgatccaggcttcaggcccaactctacagacccaggaaacaggcctaccatctgctaacacaggcaccaggccagcctgcctgaggactttggcaacaagttcacctgcagaccacactagacaccctacaaagagttgctggatgactaggaaagggtttttccagataaagccggtatgcaagaactagaataagtttcttgtttttcaaatgtgcagacactaatgcactgcctaaaaatcaagatcaagaacaatcagagaa

SEQ ID NO: 418 - DNA, 262 bp, Homo sapiens
aatgaaaagatccaccccagttgatccaggcttcaggcccaactctacagacccaggaaacaggcctaccatctgctaacacaggcaccaggccagcctgcctgaggactttggcaacaagttcacctgcagaccacactagacaccctacaaagagttgctggatgactaggaaagggtttttccagataaagccggtatgcaagaactagaataagtttcttgtttttcaaatgtgcagacactaatgcactgcctaaaa

SEQ ID NO: 419 - DNA, 136 bp, Homo sapiens
ccctgctctcccaaaaaaatacaaaaattagctgggcgtgctggtgtgcctgtattcccagctacttgggaggctgaggtgggaggattgcttcagctggggaggcggaggctgcagggagccaagactgagccat

SEQ ID NO: 420 - DNA, 289 bp, Homo sapiens
ggtggagctatgttatgatcagatcgaagtgtgacccctgtgtggtccagacagccctgcagagagaaaacctttattccattatcaccaagcacctcctagtttccgacagtcatctccttctgctgggagaattagcagcagttcagggggcttatgttatgtccttgttcaactcaacttgagctcttgaactcctcctgtgggcctgtgaatgtattcattcattccacaactctgggtgcctcccacgtctggcaccgggggtacagtacacattccctgcctt

SEQ ID NO: 421 - DNA, 217 bp, Homo sapiens
cagctggccctgaccgggtgtcgggcgcccagagatgccgcgcgggaggagccgcgggagagccgccggactcagcgagcagagggtcgtggagcctgatggatcgatgagatctgaaaaagaacactgtgcgagattgtattcctgcttattctttccaagttagtaggcagattggaactatagaatttatccgtgataataataaagttcgcat

SEQ ID NO: 422 - DNA, 231 bp, Homo sapiens
caggacttgtgaaagcctgggacgagggcttggggttttattctcaatatgatagaaaatgattcaaggctgagagcaggagagtggcaggatatactgacttatttaaatctcactgtctcccacaaagaacaagttttatctctcctcatgctcctgagagaagaatgtactgcttatctaccatcatttctgcatccatcgaaacatctgggtttacctgaaaagaaa

SEQ ID NO: 423 - DNA, 297 bp, Artificial Sequence; identical to SEQ ID NO: 242
  Description of Artificial Sequence: Synthetic polynucleotide

SEQ ID NO: 424 - DNA, 91 bp, Homo sapiens
agagaaaactcagagattcgtggagactggaaccacgggtgtggagagaggggttagtagagaccagattctgcaggtactataatgacat

SEQ ID NO: 425 - DNA, 114 bp, Homo sapiens
tgtccttctgtgtgcttatgtctcttgtgacaattgttttcctccctgcccctggaggttgtcttcaagctgtggacttctgggatttgcagattttgcaacgtggtactactt

SEQ ID NO: 426 - DNA, 277 bp, Homo sapiens
atggtgaaacaagggatgtctgattggaagtagaagatatttatttaggttctaggacattagtatcagtgaggacagtaatttcctgcttgtttgtatttcagtgatcacatacacttctttacctgataacgtctctcttctctaggctggttttggttacggcttgccaatttctcgtctgtatgccaagtactttcaaggagatctgaatctctactctttatcaggatatggaacagatgctatcatctacttaaaggtatcccttgaattc

SEQ ID NO: 427 - DNA, 267 bp, Homo sapiens
ctgtcagagcctgccgagctcacggatgctgtgaaggtcatggacctgcccacccaggagccagcactggggaccacctgctacgcctcaggctggggcagcattgaaccagaggagttcttgaccccaaagaaacttcagtgtgtggacctccatgttatttccaatgacgtgtgtgcgcaagttcaccctcagaaggtgaccaagttcatgctgtgtgctggacgctggacagggggcaaaagcacctgctcgggtgattctggg

SEQ ID NO: 428 - DNA, 171 bp, Homo sapiens
tccaaaagcaagtagccaaagccgttgccaaaccccacccataaatcaatgggccctttatttatgacgactttatttattctaatatgattttatagtatttatatatattgggtcgtctgcttcccttgtatttttcttcctttttttgtaatattgaaaacgacgata

SEQ ID NO: 429 - DNA, 80 bp, Homo sapiens
tggtgatggtttccacaggaacaacagcatctttcaccaagatgggtggcaccaaccttgctgggacttggatcccaggg

SEQ ID NO: 430 - DNA, 226 bp, Homo sapiens
ccccgttcaaggtatagtctgcctttaagggagttttagaaccaacatgcaagacattgaaagaaatcttgcaagagccattattgacttagatccaaaacagcctctctcatgtctaaaaaggcacagaattttgcagatctgaggaagagggatgcattacctttttgcttcttttcaattgcttagtgtttctaatcatacttaatccacactaatgtgcgca

SEQ ID NO: 431 - DNA, 249 bp, Homo sapiens
aagagagaacaactactgtgatcaggctatgtatggaatacagtgttattttctttgaaattgtttaagtgttgtaaatatttatgtaaactgcattagaaattagctgtgtgaaataccagtgtggtttgtgtttgagttttattgagaattttaaattataacttaaaatattttataatttttaaagtatatatttatttaagcttatgtcagacctatttgacataacactataaaggttgacaa

SEQ ID NO: 432 - DNA, 272 bp, Homo sapiens
acaggcagctcggattcaactaccttagataatatttctgaaaacctaccagccagagggtagggcacaaagatggatgtaatgcactttgggaggccaaggcgggaggattgcttgagcccaggagttcaagaccagcctgggcaacataccaagacccccgtctctttaaaaatatatatattttaaatatacttaaatatatatttctaatatctttaaatatatatatatattttaaagaccaatttatgggagaattgcacacagat

SEQ ID NO: 433 - DNA, 261 bp, Homo sapiens
tgcgcacctccccttgagtggagtgcctctcatgatccttgacgaggagagagagcttgaaaagctgtttcagctgggccccccttcacctgtgaagatgccctctccaccatgggaatccaatctgttgcagtctccttcaagcattctgtcgaccctggatgttgaattgccacctgtttgctgtgacatagatatttaaatttcttagtgcttcagagtttgtgtgtatttgtattaataaagcattcttcaacagaa

SEQ ID NO: 434 - DNA, 266 bp, Homo sapiens
agtagtaccacgttgcaaaatctgcaaatcccagaagtccacagcttgaagacaacctccaggggcagggaggaaaacaattgtcacaagagacataagcacacagaaggacaggcagctgaggaaaccagtttgcaccgccactgacccaggatacctagcaagtacccttctcctcctggaatctactgctaccacctcgaaggtatgacttttttggtctatgatctgaagaactcttttcccaaaggaagagttgctctgag

SEQ ID NO: 435 - DNA, 238 bp, Homo sapiens
atgtgtgtctattttgtaactgtaaagatgaatgtcagttgttatttattgaaatgatttcacagtgtgtggtcaacatttctcatgttgaagctttaagaactaaaatgttctaaatatcccttggacattttatgtctttcttgtaaggcatactgccttgtttaatgttaattatgcagtgtttccctctgtgttagagcagagaggtttcgatatttattgatgttttcacaaa

SEQ ID NO: 436 - DNA, 69 bp, Artificial Sequence
  Description of Artificial Sequence: Synthetic oligonucleotide
tctttcatccatacctgtgcatgagctgtattcttcacagcaacagagctcagttaaatgcaactgcaa

SEQ ID NO: 437 - DNA, 83 bp, Artificial Sequence
  Description of Artificial Sequence: Synthetic oligonucleotide
tgctcatctgtattgatgtccttggagttctacaagtggaacttaagtgtcaaaaagaatatgtggtttttagctgagcgtgg

SEQ ID NO: 438 - DNA, 263 bp, Homo sapiens
gtgacccatgaccttgccgcatgaggcctgagggcatggtgtccagagtcccagagcagatcaggccccaaagtcctgctggaccccccagccaccgtgagctcctccgtgtggctagggagctgctgtccagaggcggaggtaaacattgatccctcctgcacactcagctctctcatggaagtcggagccctcagggtcacctgaaaactctgacactacctttgccattcacctgtcccgtctccaacattaaagctttt

SEQ ID NO: 439 - DNA, 276 bp, Homo sapiens
gaagctggaggcacaacgcaccagacactcacagcaaggatggagctgaaaacataacccactctgtcctggaggcactgggaagcctagagaaggctgtgagccaaggagggagggtcttcctttggcatgggatggggatgaagtaaggagagggactggaccccctggaagctgattcactatggggggaggtgtattgaagtcctccagacaaccctcagatttgatgatttcctagtagaactcacagaaataaagagctgttatactgtg

SEQ ID NO: 440 - DNA, 200 bp, Homo sapiens
ggatattgaacctggacaagagagagaaggaacacctccgatcgaagaacgtaaagtagaaggtgattgccaggaaatggatctggaaaagactcggagtgagcgtggagatggctctgatgtaaaagagaagactccacctaatcctaagcatgctaagactaaagaagcaggagatgggcagccataagttaaaaaga

SEQ ID NO: 441 - DNA, 81 bp, Homo sapiens
cctctatgtctctttgtgtcgctttcattatgtctcttggtaactggcttcggttgtgtctctccgtgtgactattttgtt

SEQ ID NO: 442 - DNA, 174 bp, Homo sapiens
attttgctatagctgcaatgttcacagtaatccaagttccaatggcagggtggcagagtggaaccaaaagaggccaagttttgttggtgaagtataattattttttaagatcagggattcagaattgtagtatcagtgttcagttaggaagttcttatgatagtgcatggcaca

SEQ ID NO: 443 - DNA, 198 bp, Homo sapiens
attttgctatagctgcaatgttcacagtaatccaagttccaatggcagggtggcagagtggaaccaaaagaggccaagttttgttggtgaagtataattattttttaagatcagggattcagaattgtagtatcagtgttcagttaggaagttcttatgatagtgcatggcacatgtcctttccatcatctgcatttt

SEQ ID NO: 444 - DNA, 189 bp, Homo sapiens
aatttgagcaccaggattccccctcaggagaggttccagttaccaggagacactggaacctcaggtctataaaaactggaggggcagtgaaggcctattattcacagcacataagattctaggagacagatttgggcagggaagaggtgggggagagggttcattgcctcccttaaatatgctacaatt

SEQ ID NO: 445 - DNA, 41 bp, Homo sapiens
cttcatttatcttccagatagtagattctattaaccaagtt

SEQ ID NO: 446 - DNA, 80 bp, Homo sapiens
aaatccttcatttatcttccagatagtagattctattaaccaagttgcataaagagttctgattcccagaaggtaaagaa

SEQ ID NO: 447 - DNA, 152 bp, Homo sapiens; identical to SEQ ID NO: 319

SEQ ID NO: 448 - DNA, 232 bp, Homo sapiens
  modified_base (27)..(27): a, c, g, or t
gaaatcctatgcctagaaaccaattcnacatgactgctatttagggaaggcctaatctttgtaacttacaaagtgattgacagagtgggctctgggttcaaatcctgcctctgtcacttctagttgtggaatccttggcaagtgtcttaaactctttatgccattgagttattattcccatctgttattaaagagattaaagtatatgcctcagagggatgtttgagtgtaa

SEQ ID NO: 449 - DNA, 231 bp, Homo sapiens; identical to SEQ ID NO: 283

SEQ ID NO: 450 - DNA, 289 bp, Homo sapiens
  modified_base (259)..(259): a, c, g, or t
atctcaagccagttcagatgttgctgtttcctcaagttgcagttaaaacagagccaatgagcagcagtgaaacagcttcaacgacagccgacgggtctttaaacaatttctcaggttcagcaattgggagcagtagtttcagcccacgaccaactcaccaattctctccaccacagatttacccttccaacagaccatacccacatattctccctaccccttcctcacaaactatggctgcatatgggcaaacacagtntaccacaggaatgcaacaagctacagccta

SEQ ID NO: 451 - DNA, 274 bp, Homo sapiens
aagtctgtgacccgtgggagttgctggggaggggcctggtctgggccaggcctcttctttgggttgccccctcacacactctggtcatccaggaagcctctgtggccctcggaatgtgtaaaagatggtggttttaggagctgctggttttgcaactgagtgctgacggcttatttcttgttaatgattctgtcaaaagtgtcttagcgatgctcttcagcccttcatcacccacccaaaaaagattaaagtggattcttcatcagctatttta

SEQ ID NO: 452 - DNA, 37 bp, Homo sapiens
tcttctggggactatgtcctagatactccttgaattt

SEQ ID NO: 453 - DNA, 282 bp, Homo sapiens
aatctgcgggagtcttcattttcttccaacacagagatgtaaaatggaatattcttctgacgcagatatttcatgtatcgcaccatcactcgtgccatgttgcctgtccttcggtatttttccatgctggaggccattcctacttcacaagaagggtccatggttacccatgagaccgggactccctctgggccgagcatacaggctgctggcaggtcttctatgcagcgcttgatgtaatggcagctcctctcattcttccctcgctttcagttgtcattt

SEQ ID NO: 454 - DNA, 146 bp, Homo sapiens
gaatgatctgtgaatcaagcagctcctagaaccaaaataggttcagagccgctctccttggttttttttgtcaacacgcagagcaagttggctacctcccttcatatgctcgcctcatagtattcaaagacagctatcatggccac

SEQ ID NO: 455 - DNA, 165 bp, Homo sapiens
gaatgatctgtgaatcaagcagctcctagaaccaaaataggttcagagccgctctccttggttttttttgtcaacacgcagagcaagttggctacctcccttcatatgctcgcctcatagtattcaaagacagctatcatggccacattaaatcttggtttcttt

SEQ ID NO: 456 - DNA, 268 bp, Homo sapiens
tcatgctaagactggaactagacataatgaaacatcagagccagctaagagaaaagaaatatttggaggaaattgaaagtgtggaaaaaaagaatgataatcttttaaagggtctacaactgaatgagctcaccatggatgatgatactgccgtgctcgtcattgacaacggctctggcatgtgcaaggccggctttgcaggtgacgatgccccccgggctgtcttcccttccatcgtggggtgccccaggcaccagaacatgatggg

SEQ ID NO: 457 - DNA, 137 bp, Homo sapiens
ttttacactctctcttcacctttcaagtttgtttggctcttttgaataatcccagtcagctggtggtgaacatctctgcaatgatcagtgcaggtttcccaactgtcagccgctttcttctcatgagtggagactcc

SEQ ID NO: 458 - DNA, 114 bp, Homo sapiens; identical to SEQ ID NO: 425

SEQ ID NO: 459 - DNA, 224 bp, Homo sapiens
caagagtaactctgacttaggaatagagacagccagagagaaatgtgatcaatgaaggagacatctggagtgtgcgtgcttcttcagagggacgggtgatgggcagattggaaaaagcaccgcagatgggaaccttaatctttcttttctaaaattgatgctatgaaaatttgcgttttctgtaacttgtaaaaactaaaagttgcttgtctactgaaaaaaaa

SEQ ID NO: 460 - DNA, 232 bp, Homo sapiens
ttatatatcaacctgtaaacatgtgcctgtaacttacttccaaaaacaaaatcatacttattagaagaaaattctgattttatagaaaaaaaatagagcaaggagaatataacatgtttgcaaagtcatgtgttttctttctcaatgagggaaaaacaattttattacctgcttaatggtccacctggaactaaaagggatactattttctaacaaggtatatctagtaggg

SEQ ID NO: 461 - DNA, 156 bp, Homo sapiens
ttattgtcatgtgttgcttgccttgtatagttgacttcattgtctggataactatacaacctgaaaactgtcatttcaggttctgtgctctttttggagtctttaagctcagtattagtctattgcagctatctcgttttcatgctaaaatagttt

SEQ ID NO: 462 - DNA, 249 bp, Homo sapiens
cattaggtgaaatcgcaaaaaatatttctttagaaacataagcagaatcttaaagtatattttcatataacataatttgatattctgtattactttcactgttaaattctcagagtattatttggaacggcatgaaaaattaaaatttcggtcatgttttagagacagtggagtgtaaatctgtggctaattctgttggtcgtttgtattataaatgtaaaatagtattccagctattgtgcaatatgt

SEQ ID NO: 463 - DNA, 136 bp, Homo sapiens
cggacagccctgctcgaagatatagaaagagtgacctgcacaaacttggaattttttttccatacaaccctgacccatttactgtattttttttaatgaaatatgtgaatgataataaaagttgctgacttaaaaa

SEQ ID NO: 464 - DNA, 137 bp, Homo sapiens
tgatgtccggacagccctgctcgaagatatagaaagagtgacctgcacaaacttggaattttttttccatacaaccctgacccatttactgtattttttttaatgaaatatgtgaatgataataaaagttgctgact

SEQ ID NO: 465 - DNA, 25 bp, Artificial Sequence
  Description of Artificial Sequence: Synthetic oligonucleotide
gatatccccttggatttcacttgca

SEQ ID NO: 466 - DNA, 25 bp, Artificial Sequence
  Description of Artificial Sequence: Synthetic oligonucleotide
agggatatccccttggatttcactt

SEQ ID NO: 467 - DNA, 25 bp, Artificial Sequence
  Description of Artificial Sequence: Synthetic oligonucleotide
aaaatggagggatatccccttggat

SEQ ID NO: 468 - DNA, 25 bp, Artificial Sequence
  Description of Artificial Sequence: Synthetic oligonucleotide
tttcacttgcattgtgcaataagca

SEQ ID NO: 469 - DNA, 25 bp, Artificial Sequence
  Description of Artificial Sequence: Synthetic oligonucleotide
ggatatccccttggatttcacttgc

SEQ ID NO: 470 - DNA, 25 bp, Artificial Sequence
  Description of Artificial Sequence: Synthetic oligonucleotide
agaataggtataggaaagactgaat

SEQ ID NO: 471 - DNA, 25 bp, Artificial Sequence
  Description of Artificial Sequence: Synthetic oligonucleotide
atggagggatatccccttggatttc

SEQ ID NO: 472 - DNA, 25 bp, Artificial Sequence
  Description of Artificial Sequence: Synthetic oligonucleotide
aaatggagggatatccccttggatt

SEQ ID NO: 473 - DNA, 25 bp, Artificial Sequence
  Description of Artificial Sequence: Synthetic oligonucleotide
gaataggtataggaaagactgaata

SEQ ID NO: 474 - DNA, 25 bp, Artificial Sequence
  Description of Artificial Sequence: Synthetic oligonucleotide
gagggatatccccttggatttcact

SEQ ID NO: 475 - DNA, 25 bp, Artificial Sequence
  Description of Artificial Sequence: Synthetic oligonucleotide
ttcctctataaagaataggtatagg

SEQ ID NO: 476 - DNA, 25 bp, Artificial Sequence
  Description of Artificial Sequence: Synthetic oligonucleotide
agtgaccagaagaaatgacgcagaa

SEQ ID NO: 477 - DNA, 25 bp, Artificial Sequence
  Description of Artificial Sequence: Synthetic oligonucleotide
tgggagtgaccagaagaaatgacgc

SEQ ID NO: 478 - DNA, 25 bp, Artificial Sequence
  Description of Artificial Sequence: Synthetic oligonucleotide
aatgaactttttataagcattcttt

SEQ ID NO: 479 - DNA, 25 bp, Artificial Sequence
  Description of Artificial Sequence: Synthetic oligonucleotide
ccagaagaaatgacgcagaagtgaa

SEQ ID NO: 480 - DNA, 25 bp, Artificial Sequence
  Description of Artificial Sequence: Synthetic oligonucleotide
gaaatgacgcagaagtgaaatgaac

SEQ ID NO: 481 - DNA, 25 bp, Artificial Sequence
  Description of Artificial Sequence: Synthetic oligonucleotide
aactttttataagcattcttttaat

SEQ ID NO: 482 - DNA, 25 bp, Artificial Sequence
  Description of Artificial Sequence: Synthetic oligonucleotide
gagtgaccagaagaaatgacgcaga

SEQ ID NO: 483 - DNA, 25 bp, Artificial Sequence
  Description of Artificial Sequence: Synthetic oligonucleotide
atgaactttttataagcattctttt

SEQ ID NO: 484 - DNA, 25 bp, Artificial Sequence
  Description of Artificial Sequence: Synthetic oligonucleotide
gacgcagaagtgaaatgaacttttt

SEQ ID NO: 485 - DNA, 25 bp, Artificial Sequence
  Description of Artificial Sequence: Synthetic oligonucleotide
atgacgcagaagtgaaatgaacttt

SEQ ID NO: 486 - DNA, 25 bp, Artificial Sequence
  Description of Artificial Sequence: Synthetic oligonucleotide
gaactttttataagcattcttttaa

SEQ ID NO: 487 - DNA, 25 bp, Artificial Sequence
  Description of Artificial Sequence: Synthetic oligonucleotide
agtccaagcataccaacacgagcag

SEQ ID NO: 488 - DNA, 25 bp, Artificial Sequence
  Description of Artificial Sequence: Synthetic oligonucleotide
agagctgttcacagccagactggca

SEQ ID NO: 489 - DNA, 25 bp, Artificial Sequence
  Description of Artificial Sequence: Synthetic oligonucleotide
gcatggctgggaacccaagtccaag

SEQ ID NO: 490 - DNA, 25 bp, Artificial Sequence
  Description of Artificial Sequence: Synthetic oligonucleotide
accacagcagttgaaaagactccaa

SEQ ID NO: 491 - DNA, 25 bp, Artificial Sequence
  Description of Artificial Sequence: Synthetic oligonucleotide
aaagcactgacttctaagtaaaacc

SEQ ID NO: 492 - DNA, 25 bp, Artificial Sequence
  Description of Artificial Sequence: Synthetic oligonucleotide
tcaaacagtctcaggaaatcaaata

SEQ ID NO: 493 - DNA, 25 bp, Artificial Sequence
  Description of Artificial Sequence: Synthetic oligonucleotide
gccagttatggctataggtgctaca

SEQ ID NO: 494 - DNA, 25 bp, Artificial Sequence
  Description of Artificial Sequence: Synthetic oligonucleotide
gctcccctcggagaagagctgttca

SEQ ID NO: 495 - DNA, 25 bp, Artificial Sequence
  Description of Artificial Sequence: Synthetic oligonucleotide
tgtaagggaaactgccagcaacgca

SEQ ID NO: 496 - DNA, 25 bp, Artificial Sequence
  Description of Artificial Sequence: Synthetic oligonucleotide
ctactgtcagctcccctcggagaag

SEQ ID NO: 497 - DNA, 25 bp, Artificial Sequence
  Description of Artificial Sequence: Synthetic oligonucleotide
aacacgagcaggctactgtcagctc

SEQ ID NO: 498 - DNA, 25 bp, Artificial Sequence
  Description of Artificial Sequence: Synthetic oligonucleotide
gtttcctacatctgacagcacctaa

SEQ ID NO: 499 - DNA, 25 bp, Artificial Sequence
  Description of Artificial Sequence: Synthetic oligonucleotide
attgcaggcactggcgccctctggt

SEQ ID NO: 500 - DNA, 25 bp, Artificial Sequence
  Description of Artificial Sequence: Synthetic oligonucleotide
atctgacagcacctaaaatgtttga

SEQ ID NO: 501 - DNA, 25 bp, Artificial Sequence
  Description of Artificial Sequence: Synthetic oligonucleotide
aatggctacttgacctacagcaaaa

SEQ ID NO: 502 - DNA, 25 bp, Artificial Sequence
  Description of Artificial Sequence: Synthetic oligonucleotide
aagccatttctgtaccataaaaatt

SEQ ID NO: 503 - DNA, 25 bp, Artificial Sequence
  Description of Artificial Sequence: Synthetic oligonucleotide
gtcaaatatcacctaaactggttag

SEQ ID NO: 504 - DNA, 25 bp, Artificial Sequence
  Description of Artificial Sequence: Synthetic oligonucleotide
cgccctctggtggttatgaagacaa

SEQ ID NO: 505 - DNA, 25 bp, Artificial Sequence
  Description of Artificial Sequence: Synthetic oligonucleotide
ttgacctacagcaaaagccatttct

SEQ ID NO: 506 - DNA, 25 bp, Artificial Sequence
  Description of Artificial Sequence: Synthetic oligonucleotide
atcatatgtttcctacatctgacag

SEQ ID NO: 507 - DNA, 25 bp, Artificial Sequence
  Description of Artificial Sequence: Synthetic oligonucleotide
actggttagattacttctacagcta

SEQ ID NO: 508 - DNA, 25 bp, Artificial Sequence
  Description of Artificial Sequence: Synthetic oligonucleotide
ggcaatgtccaaagtcaaatatcac

SEQ ID NO: 509 - DNA, 25 bp, Artificial Sequence
  Description of Artificial Sequence: Synthetic oligonucleotide
acaatcttctcttcctaataaacag

SEQ ID NO: 510 - DNA, 25 bp, Artificial Sequence
  Description of Artificial Sequence: Synthetic oligonucleotide
cctcctagaggccacattctattct

SEQ ID NO: 511 - DNA, 25 bp, Artificial Sequence
  Description of Artificial Sequence: Synthetic oligonucleotide
ctgacctggaatgaggcctaaacca

SEQ ID NO: 512 - DNA, 25 bp, Artificial Sequence
  Description of Artificial Sequence: Synthetic oligonucleotide
ccagctgacctggaatgaggcctaa

SEQ ID NO: 513 - DNA, 25 bp, Artificial Sequence
  Description of Artificial Sequence: Synthetic oligonucleotide
tcctagaggccacattctattcttt

SEQ ID NO: 514 - DNA, 25 bp, Artificial Sequence
  Description of Artificial Sequence: Synthetic oligonucleotide
tggtccacatcactgaggaagtaga

SEQ ID NO: 515 - DNA, 25 bp, Artificial Sequence
  Description of Artificial Sequence: Synthetic oligonucleotide
tcttctcttcctaataaacagcctc

SEQ ID NO: 516 - DNA, 25 bp, Artificial Sequence
  Description of Artificial Sequence: Synthetic oligonucleotide
gagagaattgcccagctgacctgga

SEQ ID NO: 517 - DNA, 25 bp, Artificial Sequence
  Description of Artificial Sequence: Synthetic oligonucleotide
tgaggcctaaaccacaatcttctct

SEQ ID NO: 518 - DNA, 25 bp, Artificial Sequence
  Description of Artificial Sequence: Synthetic oligonucleotide
aaacaggacacaagatggcaagcct

SEQ ID NO: 519 - DNA, 25 bp, Artificial Sequence
  Description of Artificial Sequence: Synthetic oligonucleotide
agcctgagagaattgcccagctgac

SEQ ID NO: 520 - DNA, 25 bp, Artificial Sequence
  Description of Artificial Sequence: Synthetic oligonucleotide
ccgccccatcttaatgtataaccaa

SEQ ID NO: 521 - DNA, 25 bp, Artificial Sequence
  Description of Artificial Sequence: Synthetic oligonucleotide
aaatttcactcgtctaaacactttc

SEQ ID NO: 522 - DNA, 25 bp, Artificial Sequence
  Description of Artificial Sequence: Synthetic oligonucleotide
actcccgccccatcttaatgtataa

SEQ ID NO: 523 - DNA, 25 bp, Artificial Sequence
  Description of Artificial Sequence: Synthetic oligonucleotide
gaatgttaagagattgttctcactc

SEQ ID NO: 524 - DNA, 25 bp, Artificial Sequence
  Description of Artificial Sequence: Synthetic oligonucleotide
aagtataagcatcagttgtcattaa

SEQ ID NO: 525 - DNA, 25 bp, Artificial Sequence
  Description of Artificial Sequence: Synthetic oligonucleotide
gttaagagattgttctcactcccgc

SEQ ID NO: 526 - DNA, 25 bp, Artificial Sequence
  Description of Artificial Sequence: Synthetic oligonucleotide
gtcataaagtataagcatcagttgt

SEQ ID NO: 527 - DNA, 25 bp, Artificial Sequence
  Description of Artificial Sequence: Synthetic oligonucleotide
atgttctatatacccagtcataaag

SEQ ID NO: 528 - DNA, 25 bp, Artificial Sequence
  Description of Artificial Sequence: Synthetic oligonucleotide
ggaaaatttcactcgtctaaacact

SEQ ID NO: 529 - DNA, 25 bp, Artificial Sequence
  Description of Artificial Sequence: Synthetic oligonucleotide
caaacacgtggatcaacagaaaagg

SEQ ID NO: 530 - DNA, 25 bp, Artificial Sequence
  Description of Artificial Sequence: Synthetic oligonucleotide
tttaccaatcggtagagaagagaca

SEQ ID NO: 531 - DNA, 25 bp, Artificial Sequence
  Description of Artificial Sequence: Synthetic oligonucleotide
tgagaagccctcaggcctcgctgga

SEQ ID NO: 532 - DNA, 25 bp, Artificial Sequence
  Description of Artificial Sequence: Synthetic oligonucleotide
taaaggggcttatatgtgatgtcaa

SEQ ID NO: 533 - DNA, 25 bp, Artificial Sequence
  Description of Artificial Sequence: Synthetic oligonucleotide
cacctcccgattctaagaagagact

SEQ ID NO: 534 - DNA, 25 bp, Artificial Sequence
  Description of Artificial Sequence: Synthetic oligonucleotide
aagccctcaggcctcgctggatggg

SEQ ID NO: 535 - DNA, 25 bp, Artificial Sequence
  Description of Artificial Sequence: Synthetic oligonucleotide
agctgagaagccctcaggcctcgct

SEQ ID NO: 536 - DNA, 25 bp, Artificial Sequence
  Description of Artificial Sequence: Synthetic oligonucleotide
ctgtccaagcaagttaggcttgcag

SEQ ID NO: 537 - DNA, 25 bp, Artificial Sequence
  Description of Artificial Sequence: Synthetic oligonucleotide
ttcacctcccgattctaagaagaga

SEQ ID NO: 538 - DNA, 25 bp, Artificial Sequence
  Description of Artificial Sequence: Synthetic oligonucleotide
aaacctaaaaactgtggatagtgga

SEQ ID NO: 539 - DNA, 25 bp, Artificial Sequence
  Description of Artificial Sequence: Synthetic oligonucleotide
actgtggatagtggaaagattttta

SEQ ID NO: 540 - DNA, 25 bp, Artificial Sequence
  Description of Artificial Sequence: Synthetic oligonucleotide
caggaagatatgacccagctgagaa

SEQ ID NO: 541 - DNA, 25 bp, Artificial Sequence
  Description of Artificial Sequence: Synthetic oligonucleotide
tgtccaagcaagttaggcttgcagg

SEQ ID NO: 542 - DNA, 25 bp, Artificial Sequence
  Description of Artificial Sequence: Synthetic oligonucleotide
cagcctctgttaccccttggattat

SEQ ID NO: 543 - DNA, 25 bp, Artificial Sequence
  Description of Artificial Sequence: Synthetic oligonucleotide
ggattatatatcaacctgtaaacat

SEQ ID NO: 544 - DNA, 25 bp, Artificial Sequence
  Description of Artificial Sequence: Synthetic oligonucleotide
cacctggaactaaaagggatactat

SEQ ID NO: 545 - DNA, 25 bp, Artificial Sequence
  Description of Artificial Sequence: Synthetic oligonucleotide
tggtccacctggaactaaaagggat

SEQ ID NO: 546 - DNA, 25 bp, Artificial Sequence
  Description of Artificial Sequence: Synthetic oligonucleotide
ttctaacaaggtatatctagtaggg

SEQ ID NO: 547 - DNA, 25 bp, Artificial Sequence
  Description of Artificial Sequence: Synthetic oligonucleotide
tatatcaacctgtaaacatgtgcct

SEQ ID NO: 548 - DNA, 25 bp, Artificial Sequence
  Description of Artificial Sequence: Synthetic oligonucleotide
taaacatgtgcctgtaacttacttc

SEQ ID NO: 549 - DNA, 25 bp, Artificial Sequence
  Description of Artificial Sequence: Synthetic oligonucleotide
gagcaaggagaatataacatgtttg

SEQ ID NO: 550 - DNA, 25 bp, Artificial Sequence
  Description of Artificial Sequence: Synthetic oligonucleotide
caattttattacctgcttaatggtc

SEQ ID NO: 551 - DNA, 25 bp, Artificial Sequence
  Description of Artificial Sequence: Synthetic oligonucleotide
ttattacctgcttaatggtccacct

SEQ ID NO: 552 - DNA, 25 bp, Artificial Sequence
  Description of Artificial Sequence: Synthetic oligonucleotide
ttaatggtccacctggaactaaaag

SEQ ID NO: 553 - DNA, 25 bp, Artificial Sequence
  Description of Artificial Sequence: Synthetic oligonucleotide
tcttctccaaccattgacagctaac

SEQ ID NO: 554 - DNA, 25 bp, Artificial Sequence
  Description of Artificial Sequence: Synthetic oligonucleotide
ttgcaatgtccagcttttaccccta

SEQ ID NO: 555 - DNA, 25 bp, Artificial Sequence
  Description of Artificial Sequence: Synthetic oligonucleotide
ccttagacagtatttcttaaaccaa

SEQ ID NO: 556 - DNA, 25 bp, Artificial Sequence
  Description of Artificial Sequence: Synthetic oligonucleotide
tccctgtgaaaatgtggatttgcag

SEQ ID NO: 557 - DNA, 25 bp, Artificial Sequence
  Description of Artificial Sequence: Synthetic oligonucleotide
ccaaccattgacagctaacccttag

SEQ ID NO: 558 - DNA, 25 bp, Artificial Sequence
  Description of Artificial Sequence: Synthetic oligonucleotide
gctaacccttagacagtatttctta

SEQ ID NO: 559 - DNA, 25 bp, Artificial Sequence
  Description of Artificial Sequence: Synthetic oligonucleotide
tgaaaatgtggatttgcagagaccc

SEQ ID NO: 560 - DNA, 25 bp, Artificial Sequence
  Description of Artificial Sequence: Synthetic oligonucleotide
agacccaatggtctgtgatcattga

SEQ ID NO: 561 - DNA, 25 bp, Artificial Sequence
  Description of Artificial Sequence: Synthetic oligonucleotide
aatccttttgcaatgtccagctttt

SEQ ID NO: 562 - DNA, 25 bp, Artificial Sequence
  Description of Artificial Sequence: Synthetic oligonucleotide
gagactccgtcgctccaattacttc

SEQ ID NO: 563 - DNA, 25 bp, Artificial Sequence
  Description of Artificial Sequence: Synthetic oligonucleotide
taggagactccgtcgctccaattac

SEQ ID NO: 564 - DNA, 25 bp, Artificial Sequence
  Description of Artificial Sequence: Synthetic oligonucleotide
aatggttcatgaatcggagactaac

SEQ ID NO: 565 - DNA, 25 bp, Artificial Sequence
  Description of Artificial Sequence: Synthetic oligonucleotide
gcatcagttcttctgagggccttga

SEQ ID NO: 566 - DNA, 25 bp, Artificial Sequence
  Description of Artificial Sequence: Synthetic oligonucleotide
atttccacactaatgtattatatgt

SEQ ID NO: 567 - DNA, 25 bp, Artificial Sequence
  Description of Artificial Sequence: Synthetic oligonucleotide
tttagataatgttgtcaagaccaaa

SEQ ID NO: 568 - DNA, 25 bp, Artificial Sequence
  Description of Artificial Sequence: Synthetic oligonucleotide
gatgtcaagtgtcagtaaggatttt

SEQ ID NO: 569 - DNA, 25 bp, Artificial Sequence
  Description of Artificial Sequence: Synthetic oligonucleotide
tgttgtcaagaccaaaagcatggat

SEQ ID NO: 570 - DNA, 25 bp, Artificial Sequence
  Description of Artificial Sequence: Synthetic oligonucleotide
ataattattcaaatgcttcttccca

SEQ ID NO: 571 - DNA, 25 bp, Artificial Sequence
  Description of Artificial Sequence: Synthetic oligonucleotide
gaaacaaaatgagctctcctaccac

SEQ ID NO: 572 - DNA, 25 bp, Artificial Sequence
  Description of Artificial Sequence: Synthetic oligonucleotide
tttgaaacaaaatgagctctcctac

SEQ ID NO: 573 - DNA, 25 bp, Artificial Sequence
  Description of Artificial Sequence: Synthetic oligonucleotide
aaagcatggatgtcaagtgtcagta

SEQ ID NO: 574 - DNA, 25 bp, Artificial Sequence
  Description of Artificial Sequence: Synthetic oligonucleotide
cttctgagggccttgatgaaataac

SEQ ID NO: 575 - DNA, 25 bp, Artificial Sequence
  Description of Artificial Sequence: Synthetic oligonucleotide
agtcgccatgagaacttcctacctt

SEQ ID NO: 576 - DNA, 25 bp, Artificial Sequence
  Description of Artificial Sequence: Synthetic oligonucleotide
gaaggccaagtgctgcaagtgagct

SEQ ID NO: 577 - DNA, 25 bp, Artificial Sequence
  Description of Artificial Sequence: Synthetic oligonucleotide
ttctgctgtttactctctgcttact

SEQ ID NO: 578 - DNA, 25 bp, Artificial Sequence
  Description of Artificial Sequence: Synthetic oligonucleotide
tttaccaaaattcaaggcacctgtt

SEQ ID NO: 579 - DNA, 25 bp, Artificial Sequence
  Description of Artificial Sequence: Synthetic oligonucleotide
ggtggtaactttctcacaggccttg

SEQ ID NO: 580 - DNA, 25 bp, Artificial Sequence
  Description of Artificial Sequence: Synthetic oligonucleotide
atggcctcaggtggtaactttctca

SEQ ID NO: 581 - DNA, 25 bp, Artificial Sequence
  Description of Artificial Sequence: Synthetic oligonucleotide
aggccttggccacagatctgatcat

SEQ ID NO: 582 - DNA, 25 bp, Artificial Sequence
  Description of Artificial Sequence: Synthetic oligonucleotide
gagggcaatgtctctattctgcctg

SEQ ID NO: 583 - DNA, 25 bp, Artificial Sequence
  Description of Artificial Sequence: Synthetic oligonucleotide
tggccacagatctgatcattacaat

SEQ ID NO: 584 - DNA, 25 bp, Artificial Sequence
  Description of Artificial Sequence: Synthetic oligonucleotide
aattcaaggcacctgttacagaggg

SEQ ID NO: 585 - DNA, 25 bp, Artificial Sequence
  Description of Artificial Sequence: Synthetic oligonucleotide
agcagtggagggcaatgtctctatt

SEQ ID NO: 586 - DNA, 25 bp, Artificial Sequence
  Description of Artificial Sequence: Synthetic oligonucleotide
tattacgttgttattattttgttct

SEQ ID NO: 587 - DNA, 25 bp, Artificial Sequence
  Description of Artificial Sequence: Synthetic oligonucleotide
tcaatttatttgatttagtttcaat

SEQ ID NO: 588 - DNA, 25 bp, Artificial Sequence
  Description of Artificial Sequence: Synthetic oligonucleotide
atattacgttgttattattttgttc

SEQ ID NO: 589 - DNA, 25 bp, Artificial Sequence
  Description of Artificial Sequence: Synthetic oligonucleotide
ttattttgttctctatagtatcaat

SEQ ID NO: 590 - DNA, 25 bp, Artificial Sequence
  Description of Artificial Sequence: Synthetic oligonucleotide
gttctctatagtatcaatttatttg

SEQ ID NO: 591 - DNA, 25 bp, Artificial Sequence
  Description of Artificial Sequence: Synthetic oligonucleotide
tttcttttactactatattacgttg

SEQ ID NO: 592 - DNA, 25 bp, Artificial Sequence
  Description of Artificial Sequence: Synthetic oligonucleotide
tttgttctctatagtatcaatttat

SEQ ID NO: 593 - DNA, 25 bp, Artificial Sequence
  Description of Artificial Sequence: Synthetic oligonucleotide
gttgttattattttgttctctatag

SEQ ID NO: 594 - DNA, 25 bp, Artificial Sequence
  Description of Artificial Sequence: Synthetic oligonucleotide
tttattgctgacttttaaaataagt

SEQ ID NO: 595 - DNA, 25 bp, Artificial Sequence
  Description of Artificial Sequence: Synthetic oligonucleotide
actactatattacgttgttattatt

SEQ ID NO: 596 - DNA, 25 bp, Artificial Sequence
  Description of Artificial Sequence: Synthetic oligonucleotide
ttactactatattacgttgttatta

SEQ ID NO: 597 - DNA, 25 bp, Artificial Sequence
  Description of Artificial Sequence: Synthetic oligonucleotide
gccataaactttccacttatgcaga

SEQ ID NO: 598 - DNA, 25 bp, Artificial Sequence
  Description of Artificial Sequence: Synthetic oligonucleotide
actgtgggttcccaactctgttcat

SEQ ID NO: 599 - DNA, 25 bp, Artificial Sequence
  Description of Artificial Sequence: Synthetic oligonucleotide
taaactttccacttatgcagatggg

SEQ ID NO: 600 - DNA, 25 bp, Artificial Sequence
  Description of Artificial Sequence: Synthetic oligonucleotide
tgtgggttcccaactctgttcatga

SEQ ID NO: 601 - DNA, 25 bp, Artificial Sequence
  Description of Artificial Sequence: Synthetic oligonucleotide
aaacccagctcaagttccagttcct

SEQ ID NO: 602 - DNA, 25 bp, Artificial Sequence
  Description of Artificial Sequence: Synthetic oligonucleotide
tcaaacccagctcaagttccagttc

SEQ ID NO: 603 - DNA, 25 bp, Artificial Sequence
  Description of Artificial Sequence: Synthetic oligonucleotide
tgttcatgacacttccttccagcac

SEQ ID NO: 604 - DNA, 25 bp, Artificial Sequence
  Description of Artificial Sequence: Synthetic oligonucleotide
actctgttcatgacacttccttcca

SEQ ID NO: 605 - DNA, 25 bp, Artificial Sequence
  Description of Artificial Sequence: Synthetic oligonucleotide
ggcctgctcgtaagtcactgtcact

SEQ ID NO: 606 - DNA, 25 bp, Artificial Sequence
  Description of Artificial Sequence: Synthetic oligonucleotide
agatgggcctgctcgtaagtcactg

SEQ ID NO: 607 - DNA, 25 bp, Artificial Sequence
  Description of Artificial Sequence: Synthetic oligonucleotide
atgcagatgggcctgctcgtaagtc

SEQ ID NO: 608 - DNA, 25 bp, Artificial Sequence
  Description of Artificial Sequence: Synthetic oligonucleotide
caccttctccatttcacaccggtgg

SEQ ID NO: 609 - DNA, 25 bp, Artificial Sequence
  Description of Artificial Sequence: Synthetic oligonucleotide
catttcacaccggtggtacaagaaa

SEQ ID NO: 610 - DNA, 25 bp, Artificial Sequence
  Description of Artificial Sequence: Synthetic oligonucleotide
ccttctccatttcacaccggtggta

SEQ ID NO: 611 - DNA, 25 bp, Artificial Sequence
  Description of Artificial Sequence: Synthetic oligonucleotide
ctccatttcacaccggtggtacaag

SEQ ID NO: 612 - DNA, 25 bp, Artificial Sequence
  Description of Artificial Sequence: Synthetic oligonucleotide
tctccatttcacaccggtggtacaa

SEQ ID NO: 613 - DNA, 25 bp, Artificial Sequence
  Description of Artificial Sequence: Synthetic oligonucleotide
tttcacaccggtggtacaagaaatc

SEQ ID NO: 614 - DNA, 25 bp, Artificial Sequence
  Description of Artificial Sequence: Synthetic oligonucleotide
accttctccatttcacaccggtggt

SEQ ID NO: 615 - DNA, 25 bp, Artificial Sequence
  Description of Artificial Sequence: Synthetic oligonucleotide
ttctccatttcacaccggtggtaca

SEQ ID NO: 616 - DNA, 25 bp, Artificial Sequence
  Description of Artificial Sequence: Synthetic oligonucleotide
ccatttcacaccggtggtacaagaa

SEQ ID NO: 617 - DNA, 25 bp, Artificial Sequence
  Description of Artificial Sequence: Synthetic oligonucleotide
cttctccatttcacaccggtggtac

SEQ ID NO: 618 - DNA, 25 bp, Artificial Sequence
  Description of Artificial Sequence: Synthetic oligonucleotide
atttcacaccggtggtacaagaaat

SEQ ID NO: 619 - DNA, 25 bp, Artificial Sequence
  Description of Artificial Sequence: Synthetic oligonucleotide
atcttaacctatcaactttctgccc

SEQ ID NO: 620 - DNA, 25 bp, Artificial Sequence
  Description of Artificial Sequence: Synthetic oligonucleotide
cttcaacaatatttcaacgcttctg

SEQ ID NO: 621 - DNA, 25 bp, Artificial Sequence
  Description of Artificial Sequence: Synthetic oligonucleotide
gaaacatagttgtagtacttagcct

SEQ ID NO: 622 - DNA, 25 bp, Artificial Sequence
  Description of Artificial Sequence: Synthetic oligonucleotide
acaatatttcaacgcttctgcaatg

SEQ ID NO: 623 - DNA, 25 bp, Artificial Sequence
  Description of Artificial Sequence: Synthetic oligonucleotide
tcactacactgccttacataaacca

SEQ ID NO: 624 - DNA, 25 bp, Artificial Sequence
  Description of Artificial Sequence: Synthetic oligonucleotide
atagttgtagtacttagcctaccta

SEQ ID NO: 625 - DNA, 25 bp, Artificial Sequence
  Description of Artificial Sequence: Synthetic oligonucleotide
tccagtctgtttaacttctgcagtg

SEQ ID NO: 626 - DNA, 25 bp, Artificial Sequence
  Description of Artificial Sequence: Synthetic oligonucleotide
gtgccttcactacactgccttacat

SEQ ID NO: 627 - DNA, 25 bp, Artificial Sequence
  Description of Artificial Sequence: Synthetic oligonucleotide
atgttttccagtctgtttaacttct

SEQ ID NO: 628 - DNA, 25 bp, Artificial Sequence
  Description of Artificial Sequence: Synthetic oligonucleotide
tcatttttagctcgctcatttttta

SEQ ID NO: 629 - DNA, 25 bp, Artificial Sequence
  Description of Artificial Sequence: Synthetic oligonucleotide
gcattcatttttagctcgctcattt

SEQ ID NO: 630 - DNA, 25 bp, Artificial Sequence
  Description of Artificial Sequence: Synthetic oligonucleotide
cccgtgtagtttcagattcttggtc

SEQ ID NO: 631 - DNA, 25 bp, Artificial Sequence
  Description of Artificial Sequence: Synthetic oligonucleotide
gcttccttgaattaggctttcctaa

SEQ ID NO: 632 - DNA, 25 bp, Artificial Sequence
  Description of Artificial Sequence: Synthetic oligonucleotide
ggtgtcagttgacctcagtgaattc

SEQ ID NO: 633 - DNA, 25 bp, Artificial Sequence
  Description of Artificial Sequence: Synthetic oligonucleotide
agtttcagattcttggtccatggat

SEQ ID NO: 634 - DNA, 25 bp, Artificial Sequence
  Description of Artificial Sequence: Synthetic oligonucleotide
acctgaagcgccttcaaacttccaa

SEQ ID NO: 635 - DNA, 25 bp, Artificial Sequence
  Description of Artificial Sequence: Synthetic oligonucleotide
atgcttccttgaattaggctttcct

SEQ ID NO: 636 - DNA, 25 bp, Artificial Sequence
  Description of Artificial Sequence: Synthetic oligonucleotide
tgagatgcagactcccgtgtagttt

SEQ ID NO: 637 - DNA, 25 bp, Artificial Sequence
  Description of Artificial Sequence: Synthetic oligonucleotide
gcagactcccgtgtagtttcagatt

SEQ ID NO: 638 - DNA, 25 bp, Artificial Sequence
  Description of Artificial Sequence: Synthetic oligonucleotide
gtgtcagttgacctcagtgaattct

SEQ ID NO: 639 - DNA, 25 bp, Artificial Sequence
  Description of Artificial Sequence: Synthetic oligonucleotide
ttaggctttcctaacctgaagcgcc

SEQ ID NO: 640 - DNA, 25 bp, Artificial Sequence
  Description of Artificial Sequence: Synthetic oligonucleotide
tttcctaacctgaagcgccttcaaa

SEQ ID NO: 641 - DNA, 25 bp, Artificial Sequence
  Description of Artificial Sequence: Synthetic oligonucleotide
tatccttttctggagagtagtctag

SEQ ID NO: 642 - DNA, 25 bp, Artificial Sequence
  Description of Artificial Sequence: Synthetic oligonucleotide
ggagagtagtctagaccaagccaat

SEQ ID NO: 643 - DNA, 25 bp, Artificial Sequence
  Description of Artificial Sequence: Synthetic oligonucleotide
atcaaaacagaatccccaccccaat

SEQ ID NO: 644 - DNA, 25 bp, Artificial Sequence
  Description of Artificial Sequence: Synthetic oligonucleotide
tccttttctggagagtagtctagac

SEQ ID NO: 645 - DNA, 25 bp, Artificial Sequence
  Description of Artificial Sequence: Synthetic oligonucleotide
ccaagccaattgcagaaccacattc

SEQ ID NO: 646 - DNA, 25 bp, Artificial Sequence
  Description of Artificial Sequence: Synthetic oligonucleotide
agaccaagccaattgcagaaccaca

SEQ ID NO: 647 - DNA, 25 bp, Artificial Sequence
  Description of Artificial Sequence: Synthetic oligonucleotide
agcatggcccctgctgacacgagaa

SEQ ID NO: 648 - DNA, 25 bp, Artificial Sequence
  Description of Artificial Sequence: Synthetic oligonucleotide
gtctcccgtgccgcagttctatatt

SEQ ID NO: 649 - DNA, 25 bp, Artificial Sequence
  Description of Artificial Sequence: Synthetic oligonucleotide
ttttggttctaactacctccagaat

SEQ ID NO: 650 - DNA, 25 bp, Artificial Sequence
  Description of Artificial Sequence: Synthetic oligonucleotide
ctggtctcccgtgccgcagttctat

SEQ ID NO: 651 - DNA, 25 bp, Artificial Sequence
  Description of Artificial Sequence: Synthetic oligonucleotide
gtagtctagaccaagccaattgcag

SEQ ID NO: 652 - DNA, 25 bp, Artificial Sequence
  Description of Artificial Sequence: Synthetic oligonucleotide
tatcccagagaccttgatgcttggc

SEQ ID NO: 653 - DNA, 25 bp, Artificial Sequence
  Description of Artificial Sequence: Synthetic oligonucleotide
ttgccctaggatacccagatgccaa

SEQ ID NO: 654 - DNA, 25 bp, Artificial Sequence
  Description of Artificial Sequence: Synthetic oligonucleotide
cagagaccttgatgcttggcctccc

SEQ ID NO: 655 - DNA, 25 bp, Artificial Sequence
  Description of Artificial Sequence: Synthetic oligonucleotide
ggtccctcagtctggcaatgggact

SEQ ID NO: 656 - DNA, 25 bp, Artificial Sequence
  Description of Artificial Sequence: Synthetic oligonucleotide
tcttcctagccaggctatctggcct

SEQ ID NO: 657 - DNA, 25 bp, Artificial Sequence
  Description of Artificial Sequence: Synthetic oligonucleotide
gactcttagccccagactcttcatt

SEQ ID NO: 658 - DNA, 25 bp, Artificial Sequence
  Description of Artificial Sequence: Synthetic oligonucleotide
caaccctatcccagagaccttgatg

SEQ ID NO: 659 - DNA, 25 bp, Artificial Sequence
  Description of Artificial Sequence: Synthetic oligonucleotide
ttagccccagactcttcattcagtg

SEQ ID NO: 660 - DNA, 25 bp, Artificial Sequence
  Description of Artificial Sequence: Synthetic oligonucleotide
aatgggtccctcagtctggcaatgg

SEQ ID NO: 661 - DNA, 25 bp, Artificial Sequence
  Description of Artificial Sequence: Synthetic oligonucleotide
aatcttgccctaggatacccagatg

SEQ ID NO: 662 - DNA, 25 bp, Artificial Sequence
  Description of Artificial Sequence: Synthetic oligonucleotide
tccttcttcctagccaggctatctg

SEQ ID NO: 663 - DNA, 25 bp, Artificial Sequence
  Description of Artificial Sequence: Synthetic oligonucleotide
caagcaagcctagagcttgccatca

SEQ ID NO: 664 - DNA, 25 bp, Artificial Sequence
  Description of Artificial Sequence: Synthetic oligonucleotide
aagcaagcctagagcttgccatcaa

SEQ ID NO: 665 - DNA, 25 bp, Artificial Sequence
  Description of Artificial Sequence: Synthetic oligonucleotide
gcaagcctagagcttgccatcaagc

SEQ ID NO: 666 - DNA, 25 bp, Artificial Sequence
  Description of Artificial Sequence: Synthetic oligonucleotide
aagcctagagcttgccatcaagcag

SEQ ID NO: 667 - DNA, 25 bp, Artificial Sequence
  Description of Artificial Sequence: Synthetic oligonucleotide
agcctagagcttgccatcaagcagt

SEQ ID NO: 668 - DNA, 25 bp, Artificial Sequence
  Description of Artificial Sequence: Synthetic oligonucleotide
tgcttatccttggaaggtgacagcg

SEQ ID NO: 669 - DNA, 25 bp, Artificial Sequence
  Description of Artificial Sequence: Synthetic oligonucleotide
gcttatccttggaaggtgacagcga

SEQ ID NO: 670 - DNA, 25 bp, Artificial Sequence
  Description of Artificial Sequence: Synthetic oligonucleotide
cttatccttggaaggtgacagcgat

SEQ ID NO: 671 - DNA, 25 bp, Artificial Sequence
  Description of Artificial Sequence: Synthetic oligonucleotide
ttatccttggaaggtgacagcgatt

SEQ ID NO: 672 - DNA, 25 bp, Artificial Sequence
  Description of Artificial Sequence: Synthetic oligonucleotide
tatccttggaaggtgacagcgattc

SEQ ID NO: 673 - DNA, 25 bp, Artificial Sequence
  Description of Artificial Sequence: Synthetic oligonucleotide
tgacagcaataaataatttcgttgg

SEQ ID NO: 674 - DNA, 25 bp, Artificial Sequence
  Description of Artificial Sequence: Synthetic oligonucleotide
gcagatgataacgttcactttcagc

SEQ ID NO: 675 - DNA, 25 bp, Artificial Sequence
  Description of Artificial Sequence: Synthetic oligonucleotide
caagttgagtacctccttattcatg

SEQ ID NO: 676 - DNA, 25 bp, Artificial Sequence
  Description of Artificial Sequence: Synthetic oligonucleotide
cctggtcgatgttggagtggatttc

SEQ ID NO: 677 - DNA, 25 bp, Artificial Sequence
  Description of Artificial Sequence: Synthetic oligonucleotide
caaagccctggtcgatgttggagtg

SEQ ID NO: 678 - DNA, 25 bp, Artificial Sequence
  Description of Artificial Sequence: Synthetic oligonucleotide
tgagtacctccttattcatggaaca

SEQ ID NO: 679 - DNA, 25 bp, Artificial Sequence
  Description of Artificial Sequence: Synthetic oligonucleotide
tttaaacaagttgagtacctcctta

SEQ ID NO: 680 - DNA, 25 bp, Artificial Sequence
  Description of Artificial Sequence: Synthetic oligonucleotide
tccaaagccctggtcgatgttggag

SEQ ID NO: 681 - DNA, 25 bp, Artificial Sequence
  Description of Artificial Sequence: Synthetic oligonucleotide
aaacaagttgagtacctccttattc

SEQ ID NO: 682 - DNA, 25 bp, Artificial Sequence
  Description of Artificial Sequence: Synthetic oligonucleotide
gttgagtacctccttattcatggaa

SEQ ID NO: 683 - DNA, 25 bp, Artificial Sequence
  Description of Artificial Sequence: Synthetic oligonucleotide
ccctggtcgatgttggagtggattt

SEQ ID NO: 684 - DNA, 25 bp, Artificial Sequence
  Description of Artificial Sequence: Synthetic oligonucleotide
cagatgataacgttcactttcagca

SEQ ID NO: 685 - DNA, 25 bp, Artificial Sequence
  Description of Artificial Sequence: Synthetic oligonucleotide
ttaggaatcatttaccaggtttgga

SEQ ID NO: 686 - DNA, 25 bp, Artificial Sequence
  Description of Artificial Sequence: Synthetic oligonucleotide
gtccctctttgtgttcatggatagt

SEQ ID NO: 687 - DNA, 25 bp, Artificial Sequence
  Description of Artificial Sequence: Synthetic oligonucleotide
caggtttggagaggattcagacagc

SEQ ID NO: 688 - DNA, 25 bp, Artificial Sequence
  Description of Artificial Sequence: Synthetic oligonucleotide
acagctcaggtgctttcactaatgt

SEQ ID NO: 689 - DNA, 25 bp, Artificial Sequence
  Description of Artificial Sequence: Synthetic oligonucleotide
ctctttgtgttcatggatagtccaa

SEQ ID NO: 690 - DNA, 25 bp, Artificial Sequence
  Description of Artificial Sequence: Synthetic oligonucleotide
agccagaatttgaattccctcatct

SEQ ID NO: 691 - DNA, 25 bp, Artificial Sequence
  Description of Artificial Sequence: Synthetic oligonucleotide
gggctgtgcatcaggcggtttgaga

SEQ ID NO: 692 - DNA, 25 bp, Artificial Sequence
  Description of Artificial Sequence: Synthetic oligonucleotide
ggaatcatttaccaggtttggagag

SEQ ID NO: 693 - DNA, 25 bp, Artificial Sequence
  Description of Artificial Sequence: Synthetic oligonucleotide
gaacttctgtccctctttgtgttca

SEQ ID NO: 694 - DNA, 25 bp, Artificial Sequence
  Description of Artificial Sequence: Synthetic oligonucleotide
gaggattcagacagctcaggtgctt

SEQ ID NO: 695 - DNA, 25 bp, Artificial Sequence
  Description of Artificial Sequence: Synthetic oligonucleotide
tgcatcaggcggtttgagaaatatt

SEQ ID NO: 696 - DNA, 25 bp, Artificial Sequence
  Description of Artificial Sequence: Synthetic oligonucleotide
acacaatccacacacgcatagcaaa

SEQ ID NO: 697 - DNA, 25 bp, Artificial Sequence
  Description of Artificial Sequence: Synthetic oligonucleotide
attaaaagaacaacaccctagagag

SEQ ID NO: 698 - DNA, 25 bp, Artificial Sequence
  Description of Artificial Sequence: Synthetic oligonucleotide
attcaaccatcatctgtcaagaaat

SEQ ID NO: 699 - DNA, 25 bp, Artificial Sequence
  Description of Artificial Sequence: Synthetic oligonucleotide
gaacaacaccctagagagaagtcat

SEQ ID NO: 700 - DNA, 25 bp, Artificial Sequence
  Description of Artificial Sequence: Synthetic oligonucleotide
ttttcattcctcctgcaactatttt

SEQ ID NO: 701 - DNA, 25 bp, Artificial Sequence
  Description of Artificial Sequence: Synthetic oligonucleotide
acacacgcatagcaaacctccaatg

SEQ ID NO: 702 - DNA, 25 bp, Artificial Sequence
  Description of Artificial Sequence: Synthetic oligonucleotide
aatgcatgtacagaaacctgtgata

SEQ ID NO: 703 - DNA, 25 bp, Artificial Sequence
  Description of Artificial Sequence: Synthetic oligonucleotide
agaaacctgtgatatttataccctt

SEQ ID NO: 704 - DNA, 25 bp, Artificial Sequence
  Description of Artificial Sequence: Synthetic oligonucleotide
agagagaagtcatccacacacaatc

SEQ ID NO: 705 - DNA, 25 bp, Artificial Sequence
  Description of Artificial Sequence: Synthetic oligonucleotide
caatggaattgtgagtagcttaatc

SEQ ID NO: 706 - DNA, 25 bp, Artificial Sequence
  Description of Artificial Sequence: Synthetic oligonucleotide
agcaaacctccaatgcatgtacaga

SEQ ID NO: 707 - DNA, 25 bp, Artificial Sequence
  Description of Artificial Sequence: Synthetic oligonucleotide
gaaaacaaggatgacgtacctaatt

SEQ ID NO: 708 - DNA, 25 bp, Artificial Sequence
  Description of Artificial Sequence: Synthetic oligonucleotide
acaggaggaggtctgctaggtcaca

SEQ ID NO: 709 - DNA, 25 bp, Artificial Sequence
  Description of Artificial Sequence: Synthetic oligonucleotide
tgcctttgggaccttaaaggaattg

SEQ ID NO: 710 - DNA, 25 bp, Artificial Sequence
  Description of Artificial Sequence: Synthetic oligonucleotide
tgcctttcaaggagtgcctttggga

SEQ ID NO: 711 - DNA, 25 bp, Artificial Sequence
  Description of Artificial Sequence: Synthetic oligonucleotide
aactgctgggaaagagttaacaatg

SEQ ID NO: 712 - DNA, 25 bp, Artificial Sequence
  Description of Artificial Sequence: Synthetic oligonucleotide
gtctgctaggtcacatggaagaaag

SEQ ID NO: 713 - DNA, 25 bp, Artificial Sequence
  Description of Artificial Sequence: Synthetic oligonucleotide
ctgcctttcaaggagtgcctttggg

SEQ ID NO: 714 - DNA, 25 bp, Artificial Sequence
  Description of Artificial Sequence: Synthetic oligonucleotide
gtacctaattaactgctgggaaaga

SEQ ID NO: 715 - DNA, 25 bp, Artificial Sequence
  Description of Artificial Sequence: Synthetic oligonucleotide
gcgatgctgaggtaccggtgggaca

SEQ ID NO: 716 - DNA, 25 bp, Artificial Sequence
  Description of Artificial Sequence: Synthetic oligonucleotide
ggatgacgtacctaattaactgctg

SEQ ID NO: 717 - DNA, 25 bp, Artificial Sequence
  Description of Artificial Sequence: Synthetic oligonucleotide
aggaggtctgctaggtcacatggaa

SEQ ID NO: 718 - DNA, 25 bp, Artificial Sequence
  Description of Artificial Sequence: Synthetic oligonucleotide
aattcgccaatcatcccaccatata

SEQ ID NO: 719 - DNA, 25 bp, Artificial Sequence
  Description of Artificial Sequence: Synthetic oligonucleotide
aaccagttgcaccttaaaccatgga

SEQ ID NO: 720 - DNA, 25 bp, Artificial Sequence
  Description of Artificial Sequence: Synthetic oligonucleotide
ctatgcaacgtgtcttgtagcacaa

SEQ ID NO: 721 - DNA, 25 bp, Artificial Sequence
  Description of Artificial Sequence: Synthetic oligonucleotide
gtgtgttttctgtacccaaccagac

SEQ ID NO: 722 - DNA, 25 bp, Artificial Sequence
  Description of Artificial Sequence: Synthetic oligonucleotide
gttttctgtacccaaccagacttta

SEQ ID NO: 723 - DNA, 25 bp, Artificial Sequence
  Description of Artificial Sequence: Synthetic oligonucleotide
tccaccccataatttctcccagaga

SEQ ID NO: 724 - DNA, 25 bp, Artificial Sequence
  Description of Artificial Sequence: Synthetic oligonucleotide
agttgcaccttaaaccatggatatt

SEQ ID NO: 725 - DNA, 25 bp, Artificial Sequence
  Description of Artificial Sequence: Synthetic oligonucleotide
accatataaccttcgattgtgcttc

SEQ ID NO: 726 - DNA, 25 bp, Artificial Sequence
  Description of Artificial Sequence: Synthetic oligonucleotide
tgtacccaaccagactttaaataaa

SEQ ID NO: 727 - DNA, 25 bp, Artificial Sequence
  Description of Artificial Sequence: Synthetic oligonucleotide
gcaacgtgtcttgtagcacaaataa

SEQ ID NO: 728 - DNA, 25 bp, Artificial Sequence
  Description of Artificial Sequence: Synthetic oligonucleotide
ataaccttcgattgtgcttctcaac

SEQ ID NO: 729 - DNA, 25 bp, Artificial Sequence
  Description of Artificial Sequence: Synthetic oligonucleotide
aaaaatcatctcaccttgagcccac

SEQ ID NO: 730 - DNA, 25 bp, Artificial Sequence
  Description of Artificial Sequence: Synthetic oligonucleotide
gtcttgagtagacttggacccaaaa

SEQ ID NO: 731 - DNA, 25 bp, Artificial Sequence
  Description of Artificial Sequence: Synthetic oligonucleotide
aataatcatccctccttgcctagca

SEQ ID NO: 732 - DNA, 25 bp, Artificial Sequence
  Description of Artificial Sequence: Synthetic oligonucleotide
ataatcatccctccttgcctagcaa

SEQ ID NO: 733 - DNA, 25 bp, Artificial Sequence
  Description of Artificial Sequence: Synthetic oligonucleotide
tgggatttcagacccagtagctgcc

SEQ ID NO: 734 - DNA, 25 bp, Artificial Sequence
  Description of Artificial Sequence: Synthetic oligonucleotide
cacagtcaatggatccacaaggcct

SEQ ID NO: 735 - DNA, 25 bp, Artificial Sequence
  Description of Artificial Sequence: Synthetic oligonucleotide
tggaggcaatgtgggatttcagacc

SEQ ID NO: 736 - DNA, 25 bp, Artificial Sequence
  Description of Artificial Sequence: Synthetic oligonucleotide
cccaccccattgtttaatctgtaga

SEQ ID NO: 737 - DNA, 25 bp, Artificial Sequence
  Description of Artificial Sequence: Synthetic oligonucleotide
tggtgccctgggaggccagctagga

SEQ ID NO: 738 - DNA, 25 bp, Artificial Sequence
  Description of Artificial Sequence: Synthetic oligonucleotide
gcaatgtgggatttcagacccagta

SEQ ID NO: 739 - DNA, 25 bp, Artificial Sequence
  Description of Artificial Sequence: Synthetic oligonucleotide
ccctgggaggccagctaggaagcaa

SEQ ID NO: 740 - DNA, 25 bp, Artificial Sequence
  Description of Artificial Sequence: Synthetic oligonucleotide
cttgcctagcataacagagaatcct

SEQ ID NO: 741 - DNA, 25 bp, Artificial Sequence
  Description of Artificial Sequence: Synthetic oligonucleotide
gaatcctttttttaacggtgatgcg

SEQ ID NO: 742 - DNA, 25 bp, Artificial Sequence
  Description of Artificial Sequence: Synthetic oligonucleotide
tgcctagcataacagagaatccttt

SEQ ID NO: 743 - DNA, 25 bp, Artificial Sequence
  Description of Artificial Sequence: Synthetic oligonucleotide
gcctagcataacagagaatcctttt

SEQ ID NO: 744 - DNA, 25 bp, Artificial Sequence
  Description of Artificial Sequence: Synthetic oligonucleotide
tcctttttttaacggtgatgcgctg

SEQ ID NO: 745 - DNA, 25 bp, Artificial Sequence
  Description of Artificial Sequence: Synthetic oligonucleotide
aatcctttttttaacggtgatgcgc

SEQ ID NO: 746 - DNA, 25 bp, Artificial Sequence
  Description of Artificial Sequence: Synthetic oligonucleotide
cctttttttaacggtgatgcgctgt

SEQ ID NO: 747 - DNA, 25 bp, Artificial Sequence
  Description of Artificial Sequence: Synthetic oligonucleotide
atcctttttttaacggtgatgcgct

SEQ ID NO: 748 - DNA, 25 bp, Artificial Sequence
  Description of Artificial Sequence: Synthetic oligonucleotide
ccttgcctagcataacagagaatcc

SEQ ID NO: 749 - DNA, 25 bp, Artificial Sequence
  Description of Artificial Sequence: Synthetic oligonucleotide
ttgcctagcataacagagaatcctt

SEQ ID NO: 750 - DNA, 25 bp, Artificial Sequence
  Description of Artificial Sequence: Synthetic oligonucleotide
gaggacttccaagagtttcaaaccc

SEQ ID NO: 751 - DNA, 25 bp, Artificial Sequence
  Description of Artificial Sequence: Synthetic oligonucleotide
ctgtaactgcttttcggaacactaa

SEQ ID NO: 752 - DNA, 25 bp, Artificial Sequence
  Description of Artificial Sequence: Synthetic oligonucleotide
tctctcaagaaaacatcatctggtc

SEQ ID NO: 753 - DNA, 25 bp, Artificial Sequence
  Description of Artificial Sequence: Synthetic oligonucleotide
cacaatgcgtggaggccgacttggc

SEQ ID NO: 754 - DNA, 25 bp, Artificial Sequence
  Description of Artificial Sequence: Synthetic oligonucleotide
ttcaaacccagaatttcgaccgctt

SEQ ID NO: 755 - DNA, 25 bp, Artificial Sequence
  Description of Artificial Sequence: Synthetic oligonucleotide
gtcaccatagacaccacaatgcgtg

SEQ ID NO: 756 - DNA, 25 bp, Artificial Sequence
  Description of Artificial Sequence: Synthetic oligonucleotide
tctttagcttttaccaacccaaata

SEQ ID NO: 757 - DNA, 25 bp, Artificial Sequence
  Description of Artificial Sequence: Synthetic oligonucleotide
gaccgcttcgataattaaaccaagg

SEQ ID NO: 758 - DNA, 25 bp, Artificial Sequence
  Description of Artificial Sequence: Synthetic oligonucleotide
gcttttcggaacactaaaaccatat

SEQ ID NO: 759 - DNA, 25 bp, Artificial Sequence
  Description of Artificial Sequence: Synthetic oligonucleotide
tccaacctcaagtatcgctgcaatg

SEQ ID NO: 760 - DNA, 25 bp, Artificial Sequence
  Description of Artificial Sequence: Synthetic oligonucleotide
ccagaatttcgaccgcttcgataat

SEQ ID NO: 761 - DNA, 25 bp, Artificial Sequence
  Description of Artificial Sequence: Synthetic oligonucleotide
ataggccggggatggtggcttatgc

SEQ ID NO: 762 - DNA, 25 bp, Artificial Sequence
  Description of Artificial Sequence: Synthetic oligonucleotide
aggcagacggatcacctaaggacaa

SEQ ID NO: 763 - DNA, 25 bp, Artificial Sequence
  Description of Artificial Sequence: Synthetic oligonucleotide
agcctcggcatcagagtgagattct

SEQ ID NO: 764 - DNA, 25 bp, Artificial Sequence
  Description of Artificial Sequence: Synthetic oligonucleotide
cagacggatcacctaaggacaagag

SEQ ID NO: 765 - DNA, 25 bp, Artificial Sequence
  Description of Artificial Sequence: Synthetic oligonucleotide
ggcagacggatcacctaaggacaag

SEQ ID NO: 766 - DNA, 25 bp, Artificial Sequence
  Description of Artificial Sequence: Synthetic oligonucleotide
agacggatcacctaaggacaagagt

SEQ ID NO: 767 - DNA, 25 bp, Artificial Sequence
  Description of Artificial Sequence: Synthetic oligonucleotide
gcagacggatcacctaaggacaaga

SEQ ID NO: 768 - DNA, 25 bp, Artificial Sequence
  Description of Artificial Sequence: Synthetic oligonucleotide
agattttaaaaataggccggggatg

SEQ ID NO: 769 - DNA, 25 bp, Artificial Sequence
  Description of Artificial Sequence: Synthetic oligonucleotide
gacggatcacctaaggacaagagtt

SEQ ID NO: 770 - DNA, 25 bp, Artificial Sequence
  Description of Artificial Sequence: Synthetic oligonucleotide
acggatcacctaaggacaagagttc

SEQ ID NO: 771 - DNA, 25 bp, Artificial Sequence
  Description of Artificial Sequence: Synthetic oligonucleotide
gcctcggcatcagagtgagattctg

SEQ ID NO: 772 - DNA, 25 bp, Artificial Sequence
  Description of Artificial Sequence: Synthetic oligonucleotide
ccaatactgagaagcaacttgcatt

SEQ ID NO: 773 - DNA, 25 bp, Artificial Sequence
  Description of Artificial Sequence: Synthetic oligonucleotide
taatcaaaggtgctatgtccttgtg

SEQ ID NO: 774 - DNA, 25 bp, Artificial Sequence
  Description of Artificial Sequence: Synthetic oligonucleotide
tagtgtagttcacaataatgtattg

SEQ ID NO: 775 - DNA, 25 bp, Artificial Sequence
  Description of Artificial Sequence: Synthetic oligonucleotide
gacagaaaacttgcccaatactgag

SEQ ID NO: 776 - DNA, 25 bp, Artificial Sequence
  Description of Artificial Sequence: Synthetic oligonucleotide
tgtttttgcaggttactctgagaat

SEQ ID NO: 777 - DNA, 25 bp, Artificial Sequence
  Description of Artificial Sequence: Synthetic oligonucleotide
gtggatgtttttgcaggttactctg

SEQ ID NO: 778 - DNA, 25 bp, Artificial Sequence
  Description of Artificial Sequence: Synthetic oligonucleotide
tgtgtatggtactaaatgtgtcctg

SEQ ID NO: 779 - DNA, 25 bp, Artificial Sequence
  Description of Artificial Sequence: Synthetic oligonucleotide
atgtccttgtgtatggtactaaatg

SEQ ID NO: 780 - DNA, 25 bp, Artificial Sequence
  Description of Artificial Sequence: Synthetic oligonucleotide
tggtttaatgagtgtgttcatgaaa

SEQ ID NO: 781 - DNA, 25 bp, Artificial Sequence
  Description of Artificial Sequence: Synthetic oligonucleotide
aagacagaaaacttgcccaatactg

SEQ ID NO: 782 - DNA, 25 bp, Artificial Sequence
  Description of Artificial Sequence: Synthetic oligonucleotide
tcaaaggtgctatgtccttgtgtat

SEQ ID NO: 783 - DNA, 25 bp, Artificial Sequence
  Description of Artificial Sequence: Synthetic oligonucleotide
agggctatgcacctgcaggcacgtg

SEQ ID NO: 784 - DNA, 25 bp, Artificial Sequence
  Description of Artificial Sequence: Synthetic oligonucleotide
ggccacataataactactgcataat

SEQ ID NO: 785 - DNA, 25 bp, Artificial Sequence
  Description of Artificial Sequence: Synthetic oligonucleotide
caggcacgtgtgtatgcactccccg

SEQ ID NO: 786 - DNA, 25 bp, Artificial Sequence
  Description of Artificial Sequence: Synthetic oligonucleotide
actgcataatatggatacgccttat

SEQ ID NO: 787 - DNA, 25 bp, Artificial Sequence
  Description of Artificial Sequence: Synthetic oligonucleotide
tgtgtatgcactccccgcttgtgtt

SEQ ID NO: 788 - DNA, 25 bp, Artificial Sequence
  Description of Artificial Sequence: Synthetic oligonucleotide
gatttaactagttccctaatgatgg

SEQ ID NO: 789 - DNA, 25 bp, Artificial Sequence
  Description of Artificial Sequence: Synthetic oligonucleotide
aaatcccactcgctctttttgatgg

SEQ ID NO: 790 - DNA, 25 bp, Artificial Sequence
  Description of Artificial Sequence: Synthetic oligonucleotide
atggatacgccttatttgatttaac

SEQ ID NO: 791 - DNA, 25 bp, Artificial Sequence
  Description of Artificial Sequence: Synthetic oligonucleotide
ctcgctctttttgatggccacataa

SEQ ID NO: 792 - DNA, 25 bp, Artificial Sequence
  Description of Artificial Sequence: Synthetic oligonucleotide
cttgtgtatgcagggctatgcacct

SEQ ID NO: 793 - DNA, 25 bp, Artificial Sequence
  Description of Artificial Sequence: Synthetic oligonucleotide
tttgctactgcaaacgatgctataa

SEQ ID NO: 794 - DNA, 25 bp, Artificial Sequence
  Description of Artificial Sequence: Synthetic oligonucleotide
tgtctgcaaacatgtccacatggct

SEQ ID NO: 795 - DNA, 25 bp, Artificial Sequence
  Description of Artificial Sequence: Synthetic oligonucleotide
tgtccacatggctgaactttgttag

SEQ ID NO: 796 - DNA, 25 bp, Artificial Sequence
  Description of Artificial Sequence: Synthetic oligonucleotide
agccttgataggtaatccagggaag

SEQ ID NO: 797 - DNA, 25 bp, Artificial Sequence
  Description of Artificial Sequence: Synthetic oligonucleotide
tagccatgagatagtaatacagttt

SEQ ID NO: 798 - DNA, 25 bp, Artificial Sequence
  Description of Artificial Sequence: Synthetic oligonucleotide
tccagggaaggctgtgaaacaaatt

SEQ ID NO: 799 - DNA, 25 bp, Artificial Sequence
  Description of Artificial Sequence: Synthetic oligonucleotide
tacttaatctaggagtgttctttta

SEQ ID NO: 800 - DNA, 25 bp, Artificial Sequence
  Description of Artificial Sequence: Synthetic oligonucleotide
aactgtctgcaaacatgtccacatg

SEQ ID NO: 801 - DNA, 25 bp, Artificial Sequence
  Description of Artificial Sequence: Synthetic oligonucleotide
ctgaactttgttagccttgataggt

SEQ ID NO: 802 - DNA, 25 bp, Artificial Sequence
  Description of Artificial Sequence: Synthetic oligonucleotide
caatttggtagtcacaacatataat

SEQ ID NO: 803 - DNA, 25 bp, Artificial Sequence
  Description of Artificial Sequence: Synthetic oligonucleotide
gtaatacagtttcaactgtctgcaa

SEQ ID NO: 804 - DNA, 25 bp, Artificial Sequence
  Description of Artificial Sequence: Synthetic oligonucleotide
ggagtgttcttttatgtataagcca

SEQ ID NO: 805 - DNA, 25 bp, Artificial Sequence
  Description of Artificial Sequence: Synthetic oligonucleotide
aaaatgtttaagccgggcgcggtgg

SEQ ID NO: 806 - DNA, 25 bp, Artificial Sequence
  Description of Artificial Sequence: Synthetic oligonucleotide
acaaaaaatgtttaagccgggcgcg

SEQ ID NO: 807 - DNA, 25 bp, Artificial Sequence
  Description of Artificial Sequence: Synthetic oligonucleotide
caacaaaaaatgtttaagccgggcg

SEQ ID NO: 808 - DNA, 25 bp, Artificial Sequence
  Description of Artificial Sequence: Synthetic oligonucleotide
caacaacaaaaaatgtttaagccgg

SEQ ID NO: 809 - DNA, 25 bp, Artificial Sequence
  Description of Artificial Sequence: Synthetic oligonucleotide
atcacttaagcccagaaggcagagg

SEQ ID NO: 810 - DNA, 25 bp, Artificial Sequence
  Description of Artificial Sequence: Synthetic oligonucleotide
ctttgggagtccaaggagggggatc

SEQ ID NO: 811 - DNA, 25 bp, Artificial Sequence
  Description of Artificial Sequence: Synthetic oligonucleotide
ccaaggagggggatcgcttgagtcc

SEQ ID NO: 812 - DNA, 25 bp, Artificial Sequence
  Description of Artificial Sequence: Synthetic oligonucleotide
gatcacttaagcccagaaggcagag

SEQ ID NO: 813 - DNA, 25 bp, Artificial Sequence
  Description of Artificial Sequence: Synthetic oligonucleotide
ggatcacttaagcccagaaggcaga

SEQ ID NO: 814 - DNA, 25 bp, Artificial Sequence
  Description of Artificial Sequence: Synthetic oligonucleotide
gggagtccaaggagggggatcgctt

SEQ ID NO: 815 - DNA, 25 bp, Artificial Sequence
  Description of Artificial Sequence: Synthetic oligonucleotide
aaaaatgtttaagccgggcgcggtg

SEQ ID NO: 816 - DNA, 25 bp, Artificial Sequence
  Description of Artificial Sequence: Synthetic oligonucleotide
tgacaacttttctacttctttaact

SEQ ID NO: 817 - DNA, 25 bp, Artificial Sequence
  Description of Artificial Sequence: Synthetic oligonucleotide
ccacagttaacaacaaagttctgtt

SEQ ID NO: 818 - DNA, 25 bp, Artificial Sequence
  Description of Artificial Sequence: Synthetic oligonucleotide
gtattcagctattctcactctgaga

SEQ ID NO: 819 - DNA, 25 bp, Artificial Sequence
  Description of Artificial Sequence: Synthetic oligonucleotide
gttattgtcactctgagaactctcc

SEQ ID NO: 820 - DNA, 25 bp, Artificial Sequence
  Description of Artificial Sequence: Synthetic oligonucleotide
agttctttttaaatgcctaaaggca

SEQ ID NO: 821 - DNA, 25 bp, Artificial Sequence
  Description of Artificial Sequence: Synthetic oligonucleotide
cacagttaacaacacagctgttaca

SEQ ID NO: 822 - DNA, 25 bp, Artificial Sequence
  Description of Artificial Sequence: Synthetic oligonucleotide
tttttcacagtgaacctgtattcag

SEQ ID NO: 823 - DNA, 25 bp, Artificial Sequence
  Description of Artificial Sequence: Synthetic oligonucleotide
tgcctaaaggcatattctgacaact

SEQ ID NO: 824 - DNA, 25 bp, Artificial Sequence
  Description of Artificial Sequence: Synthetic oligonucleotide
gagattaagttctttttaaatgcct

SEQ ID NO: 825 - DNA, 25 bp, Artificial Sequence
  Description of Artificial Sequence: Synthetic oligonucleotide
ttaacaacacagctgttacacctcc

SEQ ID NO: 826 - DNA, 25 bp, Artificial Sequence
  Description of Artificial Sequence: Synthetic oligonucleotide
ttctgacaacttttctacttcttta

SEQ ID NO: 827 - DNA, 25 bp, Artificial Sequence
  Description of Artificial Sequence: Synthetic oligonucleotide
aatcaatgtagacgcaaattttttg

SEQ ID NO: 828 - DNA, 25 bp, Artificial Sequence
  Description of Artificial Sequence: Synthetic oligonucleotide
caaattttttggatgggcaatactt

SEQ ID NO: 829 - DNA, 25 bp, Artificial Sequence
  Description of Artificial Sequence: Synthetic oligonucleotide
ccactgagcatttccattccagttg

SEQ ID NO: 830 - DNA, 25 bp, Artificial Sequence
  Description of Artificial Sequence: Synthetic oligonucleotide
tcacctttgaagatactatgttatg

SEQ ID NO: 831 - DNA, 25 bp, Artificial Sequence
  Description of Artificial Sequence: Synthetic oligonucleotide
ggtttgctagctgcatcactagtca

SEQ ID NO: 832 - DNA, 25 bp, Artificial Sequence
  Description of Artificial Sequence: Synthetic oligonucleotide
ggctgagcaccactgagcatttcca

SEQ ID NO: 833 - DNA, 25 bp, Artificial Sequence
  Description of Artificial Sequence: Synthetic oligonucleotide
atacttatgttcacaggaaatgctt

SEQ ID NO: 834 - DNA, 25 bp, Artificial Sequence
  Description of Artificial Sequence: Synthetic oligonucleotide
agctgcatcactagtcatcttaaat

SEQ ID NO: 835 - DNA, 25 bp, Artificial Sequence
  Description of Artificial Sequence: Synthetic oligonucleotide
ggatgggcaatacttatgttcacag

SEQ ID NO: 836 - DNA, 25 bp, Artificial Sequence
  Description of Artificial Sequence: Synthetic oligonucleotide
gagaagaacaggtttcattaaacat

SEQ ID NO: 837 - DNA, 25 bp, Artificial Sequence
  Description of Artificial Sequence: Synthetic oligonucleotide
tgagcaccactgagcatttccattc

SEQ ID NO: 838 - DNA, 25 bp, Artificial Sequence
  Description of Artificial Sequence: Synthetic oligonucleotide
ctggtcctgggtaatggctgagcac

SEQ ID NO: 839 - DNA, 25 bp, Artificial Sequence
  Description of Artificial Sequence: Synthetic oligonucleotide
aatcaatgtagacgcaaattttttg

SEQ ID NO: 840 - DNA, 25 bp, Artificial Sequence
  Description of Artificial Sequence: Synthetic oligonucleotide
ccactgagcatttccattccagttg

SEQ ID NO: 841 - DNA, 25 bp, Artificial Sequence
  Description of Artificial Sequence: Synthetic oligonucleotide
tcacctttgaagatactatgttatg

SEQ ID NO: 842 - DNA, 25 bp, Artificial Sequence
  Description of Artificial Sequence: Synthetic oligonucleotide
ggcttcttgggtttgctagctgcat

SEQ ID NO: 843 - DNA, 25 bp, Artificial Sequence
  Description of Artificial Sequence: Synthetic oligonucleotide
gaagttttaacatttctccagtgat

SEQ ID NO: 844 - DNA, 25 bp, Artificial Sequence
  Description of Artificial Sequence: Synthetic oligonucleotide
ggtttgctagctgcatcactagtca

SEQ ID NO: 845 - DNA, 25 bp, Artificial Sequence
  Description of Artificial Sequence: Synthetic oligonucleotide
agctgcatcactagtcatcttaaat

SEQ ID NO: 846 - DNA, 25 bp, Artificial Sequence
  Description of Artificial Sequence: Synthetic oligonucleotide
ggatgggcaatacttatgttcacag

SEQ ID NO: 847 - DNA, 25 bp, Artificial Sequence
  Description of Artificial Sequence: Synthetic oligonucleotide
ttccattccagttggcttcttgggt

SEQ ID NO: 848 - DNA, 25 bp, Artificial Sequence
  Description of Artificial Sequence: Synthetic oligonucleotide
tgagcaccactgagcatttccattc

SEQ ID NO: 849 - DNA, 25 bp, Artificial Sequence
  Description of Artificial Sequence: Synthetic oligonucleotide
attgttgctgtcttaaactccaaag

SEQ ID NO: 850 - DNA, 25 bp, Artificial Sequence
  Description of Artificial Sequence: Synthetic oligonucleotide
gtgctttcgctcagcacaatgctta

SEQ ID NO: 851 - DNA, 25 bp, Artificial Sequence
  Description of Artificial Sequence: Synthetic oligonucleotide
tccatggaagggctcttccggcagg

SEQ ID NO: 852 - DNA, 25 bp, Artificial Sequence
  Description of Artificial Sequence: Synthetic oligonucleotide
tgaaacgtacgaaaatgctcagttc

SEQ ID NO: 853 - DNA, 25 bp, Artificial Sequence
  Description of Artificial Sequence: Synthetic oligonucleotide
actacaaacccacgtgtacttcctt

SEQ ID NO: 854 - DNA, 25 bp, Artificial Sequence
  Description of Artificial Sequence: Synthetic oligonucleotide
accttggaaactttacacagatggg

SEQ ID NO: 855 - DNA, 25 bp, Artificial Sequence
  Description of Artificial Sequence: Synthetic oligonucleotide
acaatgcttactacaaacccacgtg

SEQ ID NO: 856 - DNA, 25 bp, Artificial Sequence
  Description of Artificial Sequence: Synthetic oligonucleotide
ggctggacaccaccggccggagcat

SEQ ID NO: 857 - DNA, 25 bp, Artificial Sequence
  Description of Artificial Sequence: Synthetic oligonucleotide
gggagctcagccattccacgtgtgc

SEQ ID NO: 858 - DNA, 25 bp, Artificial Sequence
  Description of Artificial Sequence: Synthetic oligonucleotide
cagggatgcaggctcacagcgccct

SEQ ID NO: 859 - DNA, 25 bp, Artificial Sequence
  Description of Artificial Sequence: Synthetic oligonucleotide
gagcatggcggacagcacacacggc

SEQ ID NO: 860 - DNA, 25 bp, Artificial Sequence
  Description of Artificial Sequence: Synthetic oligonucleotide
aggcagcctctgacagtgccgcttt

SEQ ID NO: 861 - DNA, 25 bp, Artificial Sequence
  Description of Artificial Sequence: Synthetic oligonucleotide
gtttgcgcagggacatcacccacat

SEQ ID NO: 862 - DNA, 25 bp, Artificial Sequence
  Description of Artificial Sequence: Synthetic oligonucleotide
gtttcagagcgcagggccgttctcc

SEQ ID NO: 863 - DNA, 25 bp, Artificial Sequence
  Description of Artificial Sequence: Synthetic oligonucleotide
ttcctgccctgtttgcgcagggaca

SEQ ID NO: 864 - DNA, 25 bp, Artificial Sequence
  Description of Artificial Sequence: Synthetic oligonucleotide
gtttcttgaatcaggctctgctttc

SEQ ID NO: 865 - DNA, 25 bp, Artificial Sequence
  Description of Artificial Sequence: Synthetic oligonucleotide
cattctgcagcaattacatgtgtcc

SEQ ID NO: 866 - DNA, 25 bp, Artificial Sequence
  Description of Artificial Sequence: Synthetic oligonucleotide
gaatgtttcagagcgcagggccgtt

SEQ ID NO: 867 - DNA, 25 bp, Artificial Sequence
  Description of Artificial Sequence: Synthetic oligonucleotide
tcccaggccacagcaaaggtctgtt

SEQ ID NO: 868 - DNA, 25 bp, Artificial Sequence
  Description of Artificial Sequence: Synthetic oligonucleotide
attcccagttatctgggtcctctgg

SEQ ID NO: 869 - DNA, 25 bp, Artificial Sequence
  Description of Artificial Sequence: Synthetic oligonucleotide
acagcaaaggtctgttgaacccctc

SEQ ID NO: 870 - DNA, 25 bp, Artificial Sequence
  Description of Artificial Sequence: Synthetic oligonucleotide
tgacagtgccgctttacttgcattc

SEQ ID NO: 871 - DNA, 25 bp, Artificial Sequence
  Description of Artificial Sequence: Synthetic oligonucleotide
caaatatttgacccctctgagactt

SEQ ID NO: 872 - DNA, 25 bp, Artificial Sequence
  Description of Artificial Sequence: Synthetic oligonucleotide
gatacagtagattattaagcacctt

SEQ ID NO: 873 - DNA, 25 bp, Artificial Sequence
  Description of Artificial Sequence: Synthetic oligonucleotide
cctctgagacttggatttcacatct

SEQ ID NO: 874 - DNA, 25 bp, Artificial Sequence
  Description of Artificial Sequence: Synthetic oligonucleotide
ttgacccctctgagacttggatttc

SEQ ID NO: 875 - DNA, 25 bp, Artificial Sequence
  Description of Artificial Sequence: Synthetic oligonucleotide
cccctctgagacttggatttcacat

SEQ ID NO: 876 - DNA, 25 bp, Artificial Sequence
  Description of Artificial Sequence: Synthetic oligonucleotide
tctaccatttactaattatgtgact

SEQ ID NO: 877 - DNA, 25 bp, Artificial Sequence
  Description of Artificial Sequence: Synthetic oligonucleotide
aaatatgtacttcctttaaggaaat

SEQ ID NO: 878 - DNA, 25 bp, Artificial Sequence
  Description of Artificial Sequence: Synthetic oligonucleotide
atatttgacccctctgagacttgga

SEQ ID NO: 879 - DNA, 25 bp, Artificial Sequence
  Description of Artificial Sequence: Synthetic oligonucleotide
acagtagattattaagcaccttgct

SEQ ID NO: 880 - DNA, 25 bp, Artificial Sequence
  Description of Artificial Sequence: Synthetic oligonucleotide
agtgtaaaaagcttggttcacagta

SEQ ID NO: 881 - DNA, 25 bp, Artificial Sequence
  Description of Artificial Sequence: Synthetic oligonucleotide
ttaagtgtaaaaagcttggttcaca

SEQ ID NO: 882 - DNA, 25 bp, Artificial Sequence
  Description of Artificial Sequence: Synthetic oligonucleotide
ataaatatgtacttcctttaaggaa

SEQ ID NO: 883 - DNA, 25 bp, Artificial Sequence
  Description of Artificial Sequence: Synthetic oligonucleotide
taagcaccttgctttgattaaaaag

SEQ ID NO: 884 - DNA, 25 bp, Artificial Sequence
  Description of Artificial Sequence: Synthetic oligonucleotide
gatacagtagattattaagcacctt

SEQ ID NO: 885 - DNA, 25 bp, Artificial Sequence
  Description of Artificial Sequence: Synthetic oligonucleotide
atattcataaggagacaacacacaa

SEQ ID NO: 886 - DNA, 25 bp, Artificial Sequence
  Description of Artificial Sequence: Synthetic oligonucleotide
gtcaaatatttgacccctctgagac

SEQ ID NO: 887 - DNA, 25 bp, Artificial Sequence
  Description of Artificial Sequence: Synthetic oligonucleotide
cccctctgagacttggatttcacat

SEQ ID NO: 888 - DNA, 25 bp, Artificial Sequence
  Description of Artificial Sequence: Synthetic oligonucleotide
aaagcttggttcacagtaggtggca

SEQ ID NO: 889 - DNA, 25 bp, Artificial Sequence
  Description of Artificial Sequence: Synthetic oligonucleotide
tctaccatttactaattatgtgact

SEQ ID NO: 890 - DNA, 25 bp, Artificial Sequence
  Description of Artificial Sequence: Synthetic oligonucleotide
atatttgacccctctgagacttgga

SEQ ID NO: 891 - DNA, 25 bp, Artificial Sequence
  Description of Artificial Sequence: Synthetic oligonucleotide
acagtagattattaagcaccttgct

SEQ ID NO: 892 - DNA, 25 bp, Artificial Sequence
  Description of Artificial Sequence: Synthetic oligonucleotide
agtgtaaaaagcttggttcacagta

SEQ ID NO: 893 - DNA, 25 bp, Artificial Sequence
  Description of Artificial Sequence: Synthetic oligonucleotide
tacctgtagttgtagttcatctgtt

SEQ ID NO: 894 - DNA, 25 bp, Artificial Sequence
  Description of Artificial Sequence: Synthetic oligonucleotide
tctgtgttgatacctgtagttgtag

SEQ ID NO: 895 - DNA, 25 bp, Artificial Sequence
  Description of Artificial Sequence: Synthetic oligonucleotide
ttcatctgtgttgatacctgtagtt

SEQ ID NO: 896 - DNA, 25 bp, Artificial Sequence
  Description of Artificial Sequence: Synthetic oligonucleotide
tcattactatgtgcctttcccctgt

SEQ ID NO: 897 - DNA, 25 bp, Artificial Sequence
  Description of Artificial Sequence: Synthetic oligonucleotide
gtgttgatacctgtagttgtagttc

SEQ ID NO: 898 - DNA, 25 bp, Artificial Sequence
  Description of Artificial Sequence: Synthetic oligonucleotide
catctgtgttgatacctgtagttgt

SEQ ID NO: 899 - DNA, 25 bp, Artificial Sequence
  Description of Artificial Sequence: Synthetic oligonucleotide
tgatacctgtagttgtagttcatct

SEQ ID NO: 900 - DNA, 25 bp, Artificial Sequence
  Description of Artificial Sequence: Synthetic oligonucleotide
atacctgtagttgtagttcatctgt

SEQ ID NO: 901 - DNA, 25 bp, Artificial Sequence
  Description of Artificial Sequence: Synthetic oligonucleotide
tcatctgtgttgatacctgtagttg

SEQ ID NO: 902 - DNA, 25 bp, Artificial Sequence
  Description of Artificial Sequence: Synthetic oligonucleotide
gttgatacctgtagttgtagttcat

SEQ ID NO: 903 - DNA, 25 bp, Artificial Sequence
  Description of Artificial Sequence: Synthetic oligonucleotide
gttcatctgtgttgatacctgtagt

SEQ ID NO: 904 - DNA, 25 bp, Artificial Sequence
  Description of Artificial Sequence: Synthetic oligonucleotide
atacagggcccccagaaggtgcctg

SEQ ID NO: 905 - DNA, 25 bp, Artificial Sequence
  Description of Artificial Sequence: Synthetic oligonucleotide
gtgcctgaaacttcagatagtacca

SEQ ID NO: 906 - DNA, 25 bp, Artificial Sequence
  Description of Artificial Sequence: Synthetic oligonucleotide
tttggctgagcattatgtttttgag

SEQ ID NO: 907 - DNA, 25 bp, Artificial Sequence
  Description of Artificial Sequence: Synthetic oligonucleotide
gtagttgtagttcatctgttttcat

SEQ ID NO: 908 - DNA, 25 bp, Artificial Sequence
  Description of Artificial Sequence: Synthetic oligonucleotide
ctatgtgcctttcccctgtaagtag

SEQ ID NO: 909 - DNA, 25 bp, Artificial Sequence
  Description of Artificial Sequence: Synthetic oligonucleotide
tcattactatgtgcctttcccctgt

SEQ ID NO: 910 - DNA, 25 bp, Artificial Sequence
  Description of Artificial Sequence: Synthetic oligonucleotide
atctgtgttgatacctgtagttgta

SEQ ID NO: 911 - DNA, 25 bp, Artificial Sequence
  Description of Artificial Sequence: Synthetic oligonucleotide
atacctgtagttgtagttcatctgt

SEQ ID NO: 912 - DNA, 25 bp, Artificial Sequence
  Description of Artificial Sequence: Synthetic oligonucleotide
tgttttcattactatgtgcctttcc

SEQ ID NO: 913 - DNA, 25 bp, Artificial Sequence
  Description of Artificial Sequence: Synthetic oligonucleotide
gttgatacctgtagttgtagttcat

SEQ ID NO: 914 - DNA, 25 bp, Artificial Sequence
  Description of Artificial Sequence: Synthetic oligonucleotide
gttcatctgtgttgatacctgtagt

SEQ ID NO: 915 - DNA, 25 bp, Artificial Sequence
  Description of Artificial Sequence: Synthetic oligonucleotide
aaacgctttagatttttatgtatgt

SEQ ID NO: 916 - DNA, 25 bp, Artificial Sequence
  Description of Artificial Sequence: Synthetic oligonucleotide
aagttcccacaggtatttaatacaa

SEQ ID NO: 917 - DNA, 25 bp, Artificial Sequence
  Description of Artificial Sequence: Synthetic oligonucleotide
cacatcattgtcaagttcccacagg

SEQ ID NO: 918 - DNA, 25 bp, Artificial Sequence
  Description of Artificial Sequence: Synthetic oligonucleotide
gacacttgtttcttacctatttagg

SEQ ID NO: 919 - DNA, 25 bp, Artificial Sequence
  Description of Artificial Sequence: Synthetic oligonucleotide
gaaagacacttgtttcttacctatt

SEQ ID NO: 920 - DNA, 25 bp, Artificial Sequence
  Description of Artificial Sequence: Synthetic oligonucleotide
gacaaactagtatctattcctgatg

SEQ ID NO: 921 - DNA, 25 bp, Artificial Sequence
  Description of Artificial Sequence: Synthetic oligonucleotide
aaacctaactacatctctttggaca

SEQ ID NO: 922 - DNA, 25 bp, Artificial Sequence
  Description of Artificial Sequence: Synthetic oligonucleotide
gaagagattgccaaagcatcagtac

SEQ ID NO: 923 - DNA, 25 bp, Artificial Sequence
  Description of Artificial Sequence: Synthetic oligonucleotide
gaagagcacagtatgatccagcaaa

SEQ ID NO: 924 - DNA, 25 bp, Artificial Sequence
  Description of Artificial Sequence: Synthetic oligonucleotide
ttgccaaagcatcagtacaggactt

SEQ ID NO: 925 - DNA, 25 bp, Artificial Sequence
  Description of Artificial Sequence: Synthetic oligonucleotide
atacaaggctgtttaaggtcaaaga

SEQ ID NO: 926 - DNA, 25 bp, Artificial Sequence
  Description of Artificial Sequence: Synthetic oligonucleotide
gtggcgatttcgatgcttgcgtcca

SEQ ID NO: 927 - DNA, 25 bp, Artificial Sequence
  Description of Artificial Sequence: Synthetic oligonucleotide
agtggcgatttcgatgcttgcgtcc

SEQ ID NO: 928 - DNA, 25 bp, Artificial Sequence
  Description of Artificial Sequence: Synthetic oligonucleotide
tggcgatttcgatgcttgcgtccaa

SEQ ID NO: 929 - DNA, 25 bp, Artificial Sequence
  Description of Artificial Sequence: Synthetic oligonucleotide
ccagtggcgatttcgatgcttgcgt

SEQ ID NO: 930 - DNA, 25 bp, Artificial Sequence
  Description of Artificial Sequence: Synthetic oligonucleotide
ggccagtggcgatttcgatgcttgc

SEQ ID NO: 931 - DNA, 25 bp, Artificial Sequence
  Description of Artificial Sequence: Synthetic oligonucleotide
cagtggcgatttcgatgcttgcgtc

SEQ ID NO: 932 - DNA, 25 bp, Artificial Sequence
  Description of Artificial Sequence: Synthetic oligonucleotide
gccagtggcgatttcgatgcttgcg

SEQ ID NO: 933 - DNA, 25 bp, Artificial Sequence
  Description of Artificial Sequence: Synthetic oligonucleotide
ggcgatttcgatgcttgcgtccaag

SEQ ID NO: 934 - DNA, 25 bp, Artificial Sequence
  Description of Artificial Sequence: Synthetic oligonucleotide
aaccaaggcacataatcgtgtgtga

SEQ ID NO: 935 - DNA, 25 bp, Artificial Sequence
  Description of Artificial Sequence: Synthetic oligonucleotide
aaaccaaggcacataatcgtgtgtg

SEQ ID NO: 936 - DNA, 25 bp, Artificial Sequence
  Description of Artificial Sequence: Synthetic oligonucleotide
aaaaagcctggaacttatgatgttt

SEQ ID NO: 937 - DNA, 25 bp, Artificial Sequence
  Description of Artificial Sequence: Synthetic oligonucleotide
ccaaggcacataatcgtgtgtgagt

SEQ ID NO: 938 - DNA, 25 bp, Artificial Sequence
  Description of Artificial Sequence: Synthetic oligonucleotide
ttaaaaagcctggaacttatgatgt

SEQ ID NO: 939 - DNA, 25 bp, Artificial Sequence
  Description of Artificial Sequence: Synthetic oligonucleotide
aggcacataatcgtgtgtgagtgtg

SEQ ID NO: 940 - DNA, 25 bp, Artificial Sequence
  Description of Artificial Sequence: Synthetic oligonucleotide
taaaaagcctggaacttatgatgtt

SEQ ID NO: 941 - DNA, 25 bp, Artificial Sequence
  Description of Artificial Sequence: Synthetic oligonucleotide
aaggcacataatcgtgtgtgagtgt

SEQ ID NO: 942 - DNA, 25 bp, Artificial Sequence
  Description of Artificial Sequence: Synthetic oligonucleotide
ggcacataatcgtgtgtgagtgtgt

SEQ ID NO: 943 - DNA, 25 bp, Artificial Sequence
  Description of Artificial Sequence: Synthetic oligonucleotide
accaaggcacataatcgtgtgtgag

SEQ ID NO: 944 - DNA, 25 bp, Artificial Sequence
  Description of Artificial Sequence: Synthetic oligonucleotide
acatatgtgtgctctcatgtaaatg

SEQ ID NO: 945 - DNA, 25 bp, Artificial Sequence
  Description of Artificial Sequence: Synthetic oligonucleotide
aaccaaggcacataatcgtgtgtga

SEQ ID NO: 946 - DNA, 25 bp, Artificial Sequence
  Description of Artificial Sequence: Synthetic oligonucleotide
gtgtgtacatgcatccacatatgtg

SEQ ID NO: 947 - DNA, 25 bp, Artificial Sequence
  Description of Artificial Sequence: Synthetic oligonucleotide
tgtacatgcatccacatatgtgtgc

SEQ ID NO: 948 - DNA, 25 bp, Artificial Sequence
  Description of Artificial Sequence: Synthetic oligonucleotide
gtgtgtgccagtgtgtgtacatgca

SEQ ID NO: 949 - DNA, 25 bp, Artificial Sequence
  Description of Artificial Sequence: Synthetic oligonucleotide
aaaaagcctggaacttatgatgttt

SEQ ID NO: 950 - DNA, 25 bp, Artificial Sequence
  Description of Artificial Sequence: Synthetic oligonucleotide
gtatcatttaggtacaaaccaaggc

SEQ ID NO: 951 - DNA, 25 bp, Artificial Sequence
  Description of Artificial Sequence: Synthetic oligonucleotide
ttaaaaagcctggaacttatgatgt

SEQ ID NO: 952 - DNA, 25 bp, Artificial Sequence
  Description of Artificial Sequence: Synthetic oligonucleotide
gtaaatgattaaaaagcctggaact

SEQ ID NO: 953 - DNA, 25 bp, Artificial Sequence
  Description of Artificial Sequence: Synthetic oligonucleotide
ggcacataatcgtgtgtgagtgtgt

SEQ ID NO: 954 - DNA, 25 bp, Artificial Sequence
  Description of Artificial Sequence: Synthetic oligonucleotide
acatatgtgtgctctcatgtaaatg

SEQ ID NO: 955 - DNA, 25 bp, Artificial Sequence
  Description of Artificial Sequence: Synthetic oligonucleotide
atgtgtgctctcatgtaaatgatta

SEQ ID NO: 956 - DNA, 25 bp, Artificial Sequence
  Description of Artificial Sequence: Synthetic oligonucleotide
agtggttgacagttataaagtagtt

SEQ ID NO: 957 - DNA, 25 bp, Artificial Sequence
  Description of Artificial Sequence: Synthetic oligonucleotide
tttctatcacttgtttccaataaag

SEQ ID NO: 958 - DNA, 25 bp, Artificial Sequence
  Description of Artificial Sequence: Synthetic oligonucleotide
tttccttgtccacagtggttgacag

SEQ ID NO: 959 - DNA, 25 bp, Artificial Sequence
  Description of Artificial Sequence: Synthetic oligonucleotide
tccacagtggttgacagttataaag

SEQ ID NO: 960 - DNA, 25 bp, Artificial Sequence
  Description of Artificial Sequence: Synthetic oligonucleotide
tagaagacgcctaattgtggattat

SEQ ID NO: 961 - DNA, 25 bp, Artificial Sequence
  Description of Artificial Sequence: Synthetic oligonucleotide
ccttgtccacagtggttgacagtta

SEQ ID NO: 962 - DNA, 25 bp, Artificial Sequence
  Description of Artificial Sequence: Synthetic oligonucleotide
agaagacgcctaattgtggattata

SEQ ID NO: 963 - DNA, 25 bp, Artificial Sequence
  Description of Artificial Sequence: Synthetic oligonucleotide
atgtgtatactatttagaagacgcc

SEQ ID NO: 964 - DNA, 25 bp, Artificial Sequence
  Description of Artificial Sequence: Synthetic oligonucleotide
tatgtgtatactatttagaagacgc

SEQ ID NO: 965 - DNA, 25 bp, Artificial Sequence
  Description of Artificial Sequence: Synthetic oligonucleotide
gtgtatactatttagaagacgccta

SEQ ID NO: 966 - DNA, 25 bp, Artificial Sequence
  Description of Artificial Sequence: Synthetic oligonucleotide
ttccttgtccacagtggttgacagt

SEQ ID NO: 967 - DNA, 25 bp, Artificial Sequence
  Description of Artificial Sequence: Synthetic oligonucleotide
gtctcagtaaagtgtaggtggacaa

SEQ ID NO: 968 - DNA, 25 bp, Artificial Sequence
  Description of Artificial Sequence: Synthetic oligonucleotide
aggtggacaatcttcctgtgatatg

SEQ ID NO: 969 - DNA, 25 bp, Artificial Sequence
  Description of Artificial Sequence: Synthetic oligonucleotide
cattggtcatgtagctagataatta

SEQ ID NO: 970 - DNA, 25 bp, Artificial Sequence
  Description of Artificial Sequence: Synthetic oligonucleotide
aagtgtaggtggacaatcttcctgt

SEQ ID NO: 971 - DNA, 25 bp, Artificial Sequence
  Description of Artificial Sequence: Synthetic oligonucleotide
gatatgtagtgacattggtcatgta

SEQ ID NO: 972 - DNA, 25 bp, Artificial Sequence
  Description of Artificial Sequence: Synthetic oligonucleotide
gtaggtggacaatcttcctgtgata

SEQ ID NO: 973 - DNA, 25 bp, Artificial Sequence
  Description of Artificial Sequence: Synthetic oligonucleotide
ataaatggccattgtctttgtctca

SEQ ID NO: 974 - DNA, 25 bp, Artificial Sequence
  Description of Artificial Sequence: Synthetic oligonucleotide
ggtcatgtagctagataattatggt

SEQ ID NO: 975 - DNA, 25 bp, Artificial Sequence
  Description of Artificial Sequence: Synthetic oligonucleotide
ctcagtaaagtgtaggtggacaatc

SEQ ID NO: 976 - DNA, 25 bp, Artificial Sequence
  Description of Artificial Sequence: Synthetic oligonucleotide
ctgtgatatgtagtgacattggtca

SEQ ID NO: 977 - DNA, 25 bp, Artificial Sequence
  Description of Artificial Sequence: Synthetic oligonucleotide
taaatggccattgtctttgtctcag

SEQ ID NO: 978 - DNA, 25 bp, Artificial Sequence
  Description of Artificial Sequence: Synthetic oligonucleotide
aggtggacaatcttcctgtgatatg

SEQ ID NO: 979 - DNA, 25 bp, Artificial Sequence
  Description of Artificial Sequence: Synthetic oligonucleotide
gttttattttccttgtccacagtgg

SEQ ID NO: 980 - DNA, 25 bp, Artificial Sequence
  Description of Artificial Sequence: Synthetic oligonucleotide
gtgacattggtcatgtagctagata

SEQ ID NO: 981 - DNA, 25 bp, Artificial Sequence
  Description of Artificial Sequence: Synthetic oligonucleotide
tttctatcacttgtttccaataaag

SEQ ID NO: 982 - DNA, 25 bp, Artificial Sequence
  Description of Artificial Sequence: Synthetic oligonucleotide
tttccttgtccacagtggttgacag

SEQ ID NO: 983 - DNA, 25 bp, Artificial Sequence
  Description of Artificial Sequence: Synthetic oligonucleotide
tccacagtggttgacagttataaag

SEQ ID NO: 984 - DNA, 25 bp, Artificial Sequence
  Description of Artificial Sequence: Synthetic oligonucleotide
agaagacgcctaattgtggattata

SEQ ID NO: 985 - DNA, 25 bp, Artificial Sequence
  Description of Artificial Sequence: Synthetic oligonucleotide
aatcttcctgtgatatgtagtgaca

SEQ ID NO: 986 - DNA, 25 bp, Artificial Sequence
  Description of Artificial Sequence: Synthetic oligonucleotide
taaatggccattgtctttgtctcag

SEQ ID NO: 987 - DNA, 25 bp, Artificial Sequence
  Description of Artificial Sequence: Synthetic oligonucleotide
aaatgtgcacattttctatcacttg

SEQ ID NO: 988 - DNA, 25 bp, Artificial Sequence
  Description of Artificial Sequence: Synthetic oligonucleotide
gtgtatactatttagaagacgccta

SEQ ID NO: 989 - DNA, 25 bp, Artificial Sequence
  Description of Artificial Sequence: Synthetic oligonucleotide
cagcctgtccttgggagagggcgtc

SEQ ID NO: 990 - DNA, 25 bp, Artificial Sequence
  Description of Artificial Sequence: Synthetic oligonucleotide
agagcaggcgctcgaccagacccat

SEQ ID NO: 991 - DNA, 25 bp, Artificial Sequence
  Description of Artificial Sequence: Synthetic oligonucleotide
gaagccacagagcaggcgctcgacc

SEQ ID NO: 992 - DNA, 25 bp, Artificial Sequence
  Description of Artificial Sequence: Synthetic oligonucleotide
gagggcacggaaacctgtgccgaga

SEQ ID NO: 993 - DNA, 25 bp, Artificial Sequence
  Description of Artificial Sequence: Synthetic oligonucleotide
cctgtccttgggagagggcgtcacc

SEQ ID NO: 994 - DNA, 25 bp, Artificial Sequence
  Description of Artificial Sequence: Synthetic oligonucleotide
agactccaaataaaccggttcttgt

SEQ ID NO: 995 - DNA, 25 bp, Artificial Sequence
  Description of Artificial Sequence: Synthetic oligonucleotide
ggcgtcacccggtcagagactccaa

SEQ ID NO: 996 - DNA, 25 bp, Artificial Sequence
  Description of Artificial Sequence: Synthetic oligonucleotide
agccacagagcaggcgctcgaccag

SEQ ID NO: 997 - DNA, 25 bp, Artificial Sequence
  Description of Artificial Sequence: Synthetic oligonucleotide
ggagagggcgtcacccggtcagaga

SEQ ID NO: 998 - DNA, 25 bp, Artificial Sequence
  Description of Artificial Sequence: Synthetic oligonucleotide
caaataaaccggttcttgtcaaggc

SEQ ID NO: 999 - DNA, 25 bp, Artificial Sequence
  Description of Artificial Sequence: Synthetic oligonucleotide
agggtggcagcgagggcagggcagc

SEQ ID NO: 1000 - DNA, 25 bp, Artificial Sequence
  Description of Artificial Sequence: Synthetic oligonucleotide
gcagattttgcaacgtggtactact

SEQ ID NO: 1001 - DNA, 25 bp, Artificial Sequence
  Description of Artificial Sequence: Synthetic oligonucleotide
cagtggcggtgcaaactggtttcct

SEQ ID NO: 1002 - DNA, 25 bp, Artificial Sequence
  Description of Artificial Sequence: Synthetic oligonucleotide
tccttctgtgtgcttatgtctcttg

SEQ ID NO: 1003 - DNA, 25 bp, Artificial Sequence
  Description of Artificial Sequence: Synthetic oligonucleotide
gtcagtggcggtgcaaactggtttc

SEQ ID NO: 1004 - DNA, 25 bp, Artificial Sequence
  Description of Artificial Sequence: Synthetic oligonucleotide
tgtccttctgtgtgcttatgtctct

SEQ ID NO: 1005 - DNA, 25 bp, Artificial Sequence
  Description of Artificial Sequence: Synthetic oligonucleotide
tcagtggcggtgcaaactggtttcc

SEQ ID NO: 1006 - DNA, 25 bp, Artificial Sequence
  Description of Artificial Sequence: Synthetic oligonucleotide
ttgtgacaattgttttcctccctgc

SEQ ID NO: 1007 - DNA, 25 bp, Artificial Sequence
  Description of Artificial Sequence: Synthetic oligonucleotide
tgtgacaattgttttcctccctgcc

SEQ ID NO: 1008 - DNA, 25 bp, Artificial Sequence
  Description of Artificial Sequence: Synthetic oligonucleotide
ttgcagattttgcaacgtggtacta

SEQ ID NO: 1009 - DNA, 25 bp, Artificial Sequence
  Description of Artificial Sequence: Synthetic oligonucleotide
cttgtgacaattgttttcctccctg

SEQ ID NO: 1010 - DNA, 25 bp, Artificial Sequence
  Description of Artificial Sequence: Synthetic oligonucleotide
cagattttgcaacgtggtactactt

SEQ ID NO: 1011 - DNA, 25 bp, Artificial Sequence
  Description of Artificial Sequence: Synthetic oligonucleotide
aaacctgtaccttagtgaatatttt

SEQ ID NO: 1012 - DNA, 25 bp, Artificial Sequence
  Description of Artificial Sequence: Synthetic oligonucleotide
tttagattagggtaatacagacact

SEQ ID NO: 1013 - DNA, 25 bp, Artificial Sequence
  Description of Artificial Sequence: Synthetic oligonucleotide
ctgaagattatttgagaactgtact

SEQ ID NO: 1014 - DNA, 25 bp, Artificial Sequence
  Description of Artificial Sequence: Synthetic oligonucleotide
aaattctgtgttctcctaatattat

SEQ ID NO: 1015 - DNA, 25 bp, Artificial Sequence
  Description of Artificial Sequence: Synthetic oligonucleotide
ggcataaactcatttcattgttata

SEQ ID NO: 1016 - DNA, 25 bp, Artificial Sequence
  Description of Artificial Sequence: Synthetic oligonucleotide
actgtacttggcataaactcatttc

SEQ ID NO: 1017 - DNA, 25 bp, Artificial Sequence
  Description of Artificial Sequence: Synthetic oligonucleotide
ataaacctgtaccttagtgaatatt

SEQ ID NO: 1018 - DNA, 25 bp, Artificial Sequence
  Description of Artificial Sequence: Synthetic oligonucleotide
agattatttgagaactgtacttggc

SEQ ID NO: 1019 - DNA, 25 bp, Artificial Sequence
  Description of Artificial Sequence: Synthetic oligonucleotide
gattagggtaatacagacactgaag

SEQ ID NO: 1020 - DNA, 25 bp, Artificial Sequence
  Description of Artificial Sequence: Synthetic oligonucleotide
tattttaacctatggaaaattctgt

SEQ ID NO: 1021 - DNA, 25 bp, Artificial Sequence
  Description of Artificial Sequence: Synthetic oligonucleotide
gtacttggcataaactcatttcatt

SEQ ID NO: 1022 - DNA, 25 bp, Artificial Sequence
  Description of Artificial Sequence: Synthetic oligonucleotide
aaacctgtaccttagtgaatatttt

SEQ ID NO: 1023 - DNA, 25 bp, Artificial Sequence
  Description of Artificial Sequence: Synthetic oligonucleotide
ttgagaactgtacttggcataaact

SEQ ID NO: 1024 - DNA, 25 bp, Artificial Sequence
  Description of Artificial Sequence: Synthetic oligonucleotide
aaattctgtgttctcctaatattat

SEQ ID NO: 1025 - DNA, 25 bp, Artificial Sequence
  Description of Artificial Sequence: Synthetic oligonucleotide
ggcataaactcatttcattgttata

SEQ ID NO: 1026 - DNA, 25 bp, Artificial Sequence
  Description of Artificial Sequence: Synthetic oligonucleotide
ataaacctgtaccttagtgaatatt

SEQ ID NO: 1027 - DNA, 25 bp, Artificial Sequence
  Description of Artificial Sequence: Synthetic oligonucleotide
agattatttgagaactgtacttggc

SEQ ID NO: 1028 - DNA, 25 bp, Artificial Sequence
  Description of Artificial Sequence: Synthetic oligonucleotide
gattagggtaatacagacactgaag

SEQ ID NO: 1029 - DNA, 25 bp, Artificial Sequence
  Description of Artificial Sequence: Synthetic oligonucleotide
acttctattccagatgcctttgagt

SEQ ID NO: 1030 - DNA, 25 bp, Artificial Sequence
  Description of Artificial Sequence: Synthetic oligonucleotide
aacctatggaaaattctgtgttctc

SEQ ID NO: 1031 - DNA, 25 bp, Artificial Sequence
  Description of Artificial Sequence: Synthetic oligonucleotide
gtacttggcataaactcatttcatt

SEQ ID NO: 1032 - DNA, 25 bp, Artificial Sequence
  Description of Artificial Sequence: Synthetic oligonucleotide
ctgtgttctcctaatattattgctt

SEQ ID NO: 1033 - DNA, 25 bp, Artificial Sequence
  Description of Artificial Sequence: Synthetic oligonucleotide
aatttgcgttttctgtaacttgtaa

SEQ ID NO: 1034 - DNA, 25 bp, Artificial Sequence
  Description of Artificial Sequence: Synthetic oligonucleotide
ttgcgttttctgtaacttgtaaaaa

SEQ ID NO: 1035 - DNA, 25 bp, Artificial Sequence
  Description of Artificial Sequence: Synthetic oligonucleotide
cagagggacgggtgatgggcagatt

SEQ ID NO: 1036 - DNA, 25 bp, Artificial Sequence
  Description of Artificial Sequence: Synthetic oligonucleotide
caccgcagatgggaaccttaatctt

SEQ ID NO: 1037 - DNA, 25 bp, Artificial Sequence
  Description of Artificial Sequence: Synthetic oligonucleotide
agaaatgtgatcaatgaaggagaca

SEQ ID NO: 1038 - DNA, 25 bp, Artificial Sequence
  Description of Artificial Sequence: Synthetic oligonucleotide
gggcagattggaaaaagcaccgcag

SEQ ID NO: 1039 - DNA, 25 bp, Artificial Sequence
  Description of Artificial Sequence: Synthetic oligonucleotide
tgatgggcagattggaaaaagcacc

SEQ ID NO: 1040 - DNA, 25 bp, Artificial Sequence
  Description of Artificial Sequence: Synthetic oligonucleotide
accgcagatgggaaccttaatcttt

SEQ ID NO: 1041 - DNA, 25 bp, Artificial Sequence
  Description of Artificial Sequence: Synthetic oligonucleotide
tgacttaggaatagagacagccaga

SEQ ID NO: 1042 - DNA, 25 bp, Artificial Sequence
  Description of Artificial Sequence: Synthetic oligonucleotide
acttaggaatagagacagccagaga

SEQ ID NO: 1043 - DNA, 25 bp, Artificial Sequence
  Description of Artificial Sequence: Synthetic oligonucleotide
acgggtgatgggcagattggaaaaa

SEQ ID NO: 1044 - DNA, 25 bp, Artificial Sequence
  Description of Artificial Sequence: Synthetic oligonucleotide
gaaatcaactattcaggaccggccc

SEQ ID NO: 1045 - DNA, 25 bp, Artificial Sequence
  Description of Artificial Sequence: Synthetic oligonucleotide
agagaaatcaactattcaggaccgg

SEQ ID NO: 1046 - DNA, 25 bp, Artificial Sequence
  Description of Artificial Sequence: Synthetic oligonucleotide
gagagaaatcaactattcaggaccg

SEQ ID NO: 1047 - DNA, 25 bp, Artificial Sequence
  Description of Artificial Sequence: Synthetic oligonucleotide
ctattcaggaccggcccccaccttt

SEQ ID NO: 1048 - DNA, 25 bp, Artificial Sequence
  Description of Artificial Sequence: Synthetic oligonucleotide
aaatcaactattcaggaccggcccc

SEQ ID NO: 1049 - DNA, 25 bp, Artificial Sequence
  Description of Artificial Sequence: Synthetic oligonucleotide
agaaatcaactattcaggaccggcc

SEQ ID NO: 1050 - DNA, 25 bp, Artificial Sequence
  Description of Artificial Sequence: Synthetic oligonucleotide
gagaaatcaactattcaggaccggc

SEQ ID NO: 1051 - DNA, 25 bp, Artificial Sequence
  Description of Artificial Sequence: Synthetic oligonucleotide
tcaactattcaggaccggcccccac

SEQ ID NO: 1052 - DNA, 25 bp, Artificial Sequence
  Description of Artificial Sequence: Synthetic oligonucleotide
tattcaggaccggcccccacctttc

SEQ ID NO: 1053 - DNA, 25 bp, Artificial Sequence
  Description of Artificial Sequence: Synthetic oligonucleotide
aactattcaggaccggcccccacct

SEQ ID NO: 1054 - DNA, 25 bp, Artificial Sequence
  Description of Artificial Sequence: Synthetic oligonucleotide
atcaactattcaggaccggccccca

SEQ ID NO: 1055 - DNA, 25 bp, Artificial Sequence
  Description of Artificial Sequence: Synthetic oligonucleotide
ttggagggtacggaccccacatgag

SEQ ID NO: 1056 - DNA, 25 bp, Artificial Sequence
  Description of Artificial Sequence: Synthetic oligonucleotide
gacactgtcatctctcaagtaccca

SEQ ID NO: 1057 - DNA, 25 bp, Artificial Sequence
  Description of Artificial Sequence: Synthetic oligonucleotide
atctctcaagtacccatcttggagg

SEQ ID NO: 1058 - DNA, 25 bp, Artificial Sequence
  Description of Artificial Sequence: Synthetic oligonucleotide
tgtcatctctcaagtacccatcttg

SEQ ID NO: 1059 - DNA, 25 bp, Artificial Sequence
  Description of Artificial Sequence: Synthetic oligonucleotide
actgtcatctctcaagtacccatct

SEQ ID NO: 1060 - DNA, 25 bp, Artificial Sequence
  Description of Artificial Sequence: Synthetic oligonucleotide
ccatcttggagggtacggaccccac

SEQ ID NO: 1061 - DNA, 25 bp, Artificial Sequence
  Description of Artificial Sequence: Synthetic oligonucleotide
tgctttatataggacactgtcatct

SEQ ID NO: 1062 - DNA, 25 bp, Artificial Sequence
  Description of Artificial Sequence: Synthetic oligonucleotide
tacccatcttggagggtacggaccc

SEQ ID NO: 1063 - DNA, 25 bp, Artificial Sequence
  Description of Artificial Sequence: Synthetic oligonucleotide
atcttggagggtacggaccccacat

SEQ ID NO: 1064 - DNA, 25 bp, Artificial Sequence
  Description of Artificial Sequence: Synthetic oligonucleotide
gtgctttatataggacactgtcatc

SEQ ID NO: 1065 - DNA, 25 bp, Artificial Sequence
  Description of Artificial Sequence: Synthetic oligonucleotide
tctcaagtacccatcttggagggta

SEQ ID NO: 1066 - DNA, 25 bp, Artificial Sequence
  Description of Artificial Sequence: Synthetic oligonucleotide
gcacaagagaatgtagggccaccca

SEQ ID NO: 1067 - DNA, 25 bp, Artificial Sequence
  Description of Artificial Sequence: Synthetic oligonucleotide
ggccacccagaagctggctctcatt

SEQ ID NO: 1068 - DNA, 25 bp, Artificial Sequence
  Description of Artificial Sequence: Synthetic oligonucleotide
agaagctggctctcattgcaattac

SEQ ID NO: 1069 - DNA, 25 bp, Artificial Sequence
  Description of Artificial Sequence: Synthetic oligonucleotide
ttgagcagctactctcaccagccat

SEQ ID NO: 1070 - DNA, 25 bp, Artificial Sequence
  Description of Artificial Sequence: Synthetic oligonucleotide
agccattcacatgcaatacctcgtt

SEQ ID NO: 1071 - DNA, 25 bp, Artificial Sequence
  Description of Artificial Sequence: Synthetic oligonucleotide
gcaatacctcgtttaattctcgcag

SEQ ID NO: 1072 - DNA, 25 bp, Artificial Sequence
  Description of Artificial Sequence: Synthetic oligonucleotide
ctcgtttaattctcgcagcggcttt

SEQ ID NO: 1073 - DNA, 25 bp, Artificial Sequence
  Description of Artificial Sequence: Synthetic oligonucleotide
ttctcgcagcggctttgaaaggtgg

SEQ ID NO: 1074 - DNA, 25 bp, Artificial Sequence
  Description of Artificial Sequence: Synthetic oligonucleotide
gatggtggtattgccatttgttagg

SEQ ID NO: 1075 - DNA, 25 bp, Artificial Sequence
  Description of Artificial Sequence: Synthetic oligonucleotide
ggtaggagacatgccgtccagaaaa

SEQ ID NO: 1076 - DNA, 25 bp, Artificial Sequence
  Description of Artificial Sequence: Synthetic oligonucleotide
ggagacatgccgtccagaaaagcaa

SEQ ID NO: 1077 - DNA, 25 bp, Artificial Sequence
  Description of Artificial Sequence: Synthetic oligonucleotide
gcagtcccaagtctgaagatgcagg

SEQ ID NO: 1078 - DNA, 25 bp, Artificial Sequence
  Description of Artificial Sequence: Synthetic oligonucleotide
gagtcacagtgctgtaagaccacat

SEQ ID NO: 1079 - DNA, 25 bp, Artificial Sequence
  Description of Artificial Sequence: Synthetic oligonucleotide
tgcctaggcagccatgcccttggaa

SEQ ID NO: 1080 - DNA, 25 bp, Artificial Sequence
  Description of Artificial Sequence: Synthetic oligonucleotide
tgcccttggaagtggtgatgtctaa

SEQ ID NO: 1081 - DNA, 25 bp, Artificial Sequence
  Description of Artificial Sequence: Synthetic oligonucleotide
gcaatgagtgagtcacagtgctgta

SEQ ID NO: 1082 - DNA, 25 bp, Artificial Sequence
  Description of Artificial Sequence: Synthetic oligonucleotide
taaaatgctgtgcaatgagtgagtc

SEQ ID NO: 1083 - DNA, 25 bp, Artificial Sequence
  Description of Artificial Sequence: Synthetic oligonucleotide
gattagtaagaggttgctctggcca

SEQ ID NO: 1084 - DNA, 25 bp, Artificial Sequence
  Description of Artificial Sequence: Synthetic oligonucleotide
gtgctgtaagaccacattgcctagg

SEQ ID NO: 1085 - DNA, 25 bp, Artificial Sequence
  Description of Artificial Sequence: Synthetic oligonucleotide
gtaagaggttgctctggccaggcac

SEQ ID NO: 1086 - DNA, 25 bp, Artificial Sequence
  Description of Artificial Sequence: Synthetic oligonucleotide
ccatgcccttggaagtggtgatgtc

SEQ ID NO: 1087 - DNA, 25 bp, Artificial Sequence
  Description of Artificial Sequence: Synthetic oligonucleotide
ggtgatgtctaagtgagaactgata

SEQ ID NO: 1088 - DNA, 25 bp, Artificial Sequence
  Description of Artificial Sequence: Synthetic oligonucleotide
tgttgtatacaactttagggtttac

SEQ ID NO: 1089 - DNA, 25 bp, Artificial Sequence
  Description of Artificial Sequence: Synthetic oligonucleotide
gagataataagccacatatgaatgt

SEQ ID NO: 1090 - DNA, 25 bp, Artificial Sequence
  Description of Artificial Sequence: Synthetic oligonucleotide
tgttacctcctttcatgtctattta

SEQ ID NO: 1091 - DNA, 25 bp, Artificial Sequence
  Description of Artificial Sequence: Synthetic oligonucleotide
gggtctccttatatagtgcttcatc

SEQ ID NO: 1092 - DNA, 25 bp, Artificial Sequence
  Description of Artificial Sequence: Synthetic oligonucleotide
aagtgttacctcctttcatgtctat

SEQ ID NO: 1093 - DNA, 25 bp, Artificial Sequence
  Description of Artificial Sequence: Synthetic oligonucleotide
atcgttaataagtcaatacctgttg

SEQ ID NO: 1094 - DNA, 25 bp, Artificial Sequence
  Description of Artificial Sequence: Synthetic oligonucleotide
agtgcttcatcgttaataagtcaat

SEQ ID NO: 1095 - DNA, 25 bp, Artificial Sequence
  Description of Artificial Sequence: Synthetic oligonucleotide
tattgctatgagataataagccaca

SEQ ID NO: 1096 - DNA, 25 bp, Artificial Sequence
  Description of Artificial Sequence: Synthetic oligonucleotide
tccttatatagtgcttcatcgttaa

SEQ ID NO: 1097 - DNA, 25 bp, Artificial Sequence
  Description of Artificial Sequence: Synthetic oligonucleotide
ataagtcaatacctgttgttcctgg

SEQ ID NO: 1098 - DNA, 25 bp, Artificial Sequence
  Description of Artificial Sequence: Synthetic oligonucleotide
aagccacatatgaatgttgtataca

SEQ ID NO: 1099 - DNA, 25 bp, Artificial Sequence
  Description of Artificial Sequence: Synthetic oligonucleotide
ttttgattcaaaagcatcttaccaa

SEQ ID NO: 1100 - DNA, 25 bp, Artificial Sequence
  Description of Artificial Sequence: Synthetic oligonucleotide
atttaatcctgaagtgttacctcct

SEQ ID NO: 1101 - DNA, 25 bp, Artificial Sequence
  Description of Artificial Sequence: Synthetic oligonucleotide
gttcctgggatgttcttttttgtgc

SEQ ID NO: 1102 - DNA, 25 bp, Artificial Sequence
  Description of Artificial Sequence: Synthetic oligonucleotide
gagataataagccacatatgaatgt

SEQ ID NO: 1103 - DNA, 25 bp, Artificial Sequence
  Description of Artificial Sequence: Synthetic oligonucleotide
tgttacctcctttcatgtctattta

SEQ ID NO: 1104 - DNA, 25 bp, Artificial Sequence
  Description of Artificial Sequence: Synthetic oligonucleotide
gtctatttacactattttcccattt

SEQ ID NO: 1105 - DNA, 25 bp, Artificial Sequence
  Description of Artificial Sequence: Synthetic oligonucleotide
gggtctccttatatagtgcttcatc

SEQ ID NO: 1106 - DNA, 25 bp, Artificial Sequence
  Description of Artificial Sequence: Synthetic oligonucleotide
aagtgttacctcctttcatgtctat

SEQ ID NO: 1107 - DNA, 25 bp, Artificial Sequence
  Description of Artificial Sequence: Synthetic oligonucleotide
agtgcttcatcgttaataagtcaat

SEQ ID NO: 1108 - DNA, 25 bp, Artificial Sequence
  Description of Artificial Sequence: Synthetic oligonucleotide
tgttgtatacaactttagggtttac

SEQ ID NO: 1109 - DNA, 25 bp, Artificial Sequence
  Description of Artificial Sequence: Synthetic oligonucleotide
ataagtcaatacctgttgttcctgg

SEQ ID NO: 1110 - DNA, 25 bp, Artificial Sequence
  Description of Artificial Sequence: Synthetic oligonucleotide
aattcctcaggaagtaaaaccgaag

SEQ ID NO: 1111 - DNA, 25 bp, Artificial Sequence
  Description of Artificial Sequence: Synthetic oligonucleotide
tgggaccacagtatgtcgcaggcat

SEQ ID NO: 1112 - DNA, 25 bp, Artificial Sequence
  Description of Artificial Sequence: Synthetic oligonucleotide
tcctcaggaagtaaaaccgaagaag

SEQ ID NO: 1113 - DNA, 25 bp, Artificial Sequence
  Description of Artificial Sequence: Synthetic oligonucleotide
ctggaagcctgtgaattcctcagga

SEQ ID NO: 1114 - DNA, 25 bp, Artificial Sequence
  Description of Artificial Sequence: Synthetic oligonucleotide
tcaggaagtaaaaccgaagaagatg

SEQ ID NO: 1115 - DNA, 25 bp, Artificial Sequence
  Description of Artificial Sequence: Synthetic oligonucleotide
acagtatgtcgcaggcattactaat

SEQ ID NO: 1116 - DNA, 25 bp, Artificial Sequence
  Description of Artificial Sequence: Synthetic oligonucleotide
gaccacagtatgtcgcaggcattac

SEQ ID NO: 1117 - DNA, 25 bp, Artificial Sequence
  Description of Artificial Sequence: Synthetic oligonucleotide
cctggaagcctgtgaattcctcagg

SEQ ID NO: 1118 - DNA, 25 bp, Artificial Sequence
  Description of Artificial Sequence: Synthetic oligonucleotide
tgaattcctcaggaagtaaaaccga

SEQ ID NO: 1119 - DNA, 25 bp, Artificial Sequence
  Description of Artificial Sequence: Synthetic oligonucleotide
cacagtatgtcgcaggcattactaa

SEQ ID NO: 1120 - DNA, 25 bp, Artificial Sequence
  Description of Artificial Sequence: Synthetic oligonucleotide
gggaccacagtatgtcgcaggcatt

SEQ ID NO: 1121 - DNA, 25 bp, Artificial Sequence
  Description of Artificial Sequence: Synthetic oligonucleotide
ttccttcaagcattctgtcgaccct

SEQ ID NO: 1122 - DNA, 25 bp, Artificial Sequence
  Description of Artificial Sequence: Synthetic oligonucleotide
gagtgcctctcatgatccttgacga

SEQ ID NO: 1123 - DNA, 25 bp, Artificial Sequence
  Description of Artificial Sequence: Synthetic oligonucleotide
gtattaataaagcattctttaacag

SEQ ID NO: 1124 - DNA, 25 bp, Artificial Sequence
  Description of Artificial Sequence: Synthetic oligonucleotide
agtttccttcaagcattctgtcgac

SEQ ID NO: 1125 - DNA, 25 bp, Artificial Sequence
  Description of Artificial Sequence: Synthetic oligonucleotide
ttaaatttcttagtgcttcagagtt

SEQ ID NO: 1126 - DNA, 25 bp, Artificial Sequence
  Description of Artificial Sequence: Synthetic oligonucleotide
ggatgttgaattgccacctgtttgc

SEQ ID NO: 1127 - DNA, 25 bp, Artificial Sequence
  Description of Artificial Sequence: Synthetic oligonucleotide
atgggaatccaatctgttgcagttt

SEQ ID NO: 1128 - DNA, 25 bp, Artificial Sequence
  Description of Artificial Sequence: Synthetic oligonucleotide
aattgccacctgtttgctgtgacat

SEQ ID NO: 1129 - DNA, 25 bp, Artificial Sequence
  Description of Artificial Sequence: Synthetic oligonucleotide
tgcagtttccttcaagcattctgtc

SEQ ID NO: 1130 - DNA, 25 bp, Artificial Sequence
  Description of Artificial Sequence: Synthetic oligonucleotide
tagtgcttcagagtttgtgtgtatt

SEQ ID NO: 1131 - DNA, 25 bp, Artificial Sequence
  Description of Artificial Sequence: Synthetic oligonucleotide
tgcgcacctccccttgagtggagtg

SEQ ID NO: 1132 - DNA, 25 bp, Artificial Sequence
  Description of Artificial Sequence: Synthetic oligonucleotide
caagttcagtggttctagaccagcc

SEQ ID NO: 1133 - DNA, 25 bp, Artificial Sequence
  Description of Artificial Sequence: Synthetic oligonucleotide
tggatcacaagttcagtggttctag

SEQ ID NO: 1134 - DNA, 25 bp, Artificial Sequence
  Description of Artificial Sequence: Synthetic oligonucleotide
tcacaagttcagtggttctagacca

SEQ ID NO: 1135 - DNA, 25 bp, Artificial Sequence
  Description of Artificial Sequence: Synthetic oligonucleotide
aacttggtgcatgttggctgggcac

SEQ ID NO: 1136 - DNA, 25 bp, Artificial Sequence
  Description of Artificial Sequence: Synthetic oligonucleotide
acaagttcagtggttctagaccagc

SEQ ID NO: 1137 - DNA, 25 bp, Artificial Sequence
  Description of Artificial Sequence: Synthetic oligonucleotide
taaaaacttggtgcatgttggctgg

SEQ ID NO: 1138 - DNA, 25 bp, Artificial Sequence
  Description of Artificial Sequence: Synthetic oligonucleotide
acttggtgcatgttggctgggcaca

SEQ ID NO: 1139 - DNA, 25 bp, Artificial Sequence
  Description of Artificial Sequence: Synthetic oligonucleotide
ttaaaaacttggtgcatgttggctg

SEQ ID NO: 1140 - DNA, 25 bp, Artificial Sequence
  Description of Artificial Sequence: Synthetic oligonucleotide
aaacttggtgcatgttggctgggca

SEQ ID NO: 1141 - DNA, 25 bp, Artificial Sequence
  Description of Artificial Sequence: Synthetic oligonucleotide
gatcacaagttcagtggttctagac

SEQ ID NO: 1142 - DNA, 25 bp, Artificial Sequence
  Description of Artificial Sequence: Synthetic oligonucleotide
aaaacttggtgcatgttggctgggc

SEQ ID NO: 1143 - DNA, 25 bp, Artificial Sequence
  Description of Artificial Sequence: Synthetic oligonucleotide
gagttaatcaactgaaagtgtttcc

SEQ ID NO: 1144 - DNA, 25 bp, Artificial Sequence
  Description of Artificial Sequence: Synthetic oligonucleotide
cacacacaaagagagttaatcaact

SEQ ID NO: 1145 - DNA, 25 bp, Artificial Sequence
  Description of Artificial Sequence: Synthetic oligonucleotide
gtgaagtaatccgtaccttgtgttt

SEQ ID NO: 1146 - DNA, 25 bp, Artificial Sequence
  Description of Artificial Sequence: Synthetic oligonucleotide
gacagtgaagtaatccgtaccttgt

SEQ ID NO: 1147 - DNA, 25 bp, Artificial Sequence
  Description of Artificial Sequence: Synthetic oligonucleotide
ttccctgaaaacctcacatgcatac

SEQ ID NO: 1148 - DNA, 25 bp, Artificial Sequence
  Description of Artificial Sequence: Synthetic oligonucleotide
cttccctgaaaacctcacatgcata

SEQ ID NO: 1149 - DNA, 25 bp, Artificial Sequence
  Description of Artificial Sequence: Synthetic oligonucleotide
gaaacttatcttacaaagtgtattt

SEQ ID NO: 1150 - DNA, 25 bp, Artificial Sequence
  Description of Artificial Sequence: Synthetic oligonucleotide
gaaaccaatcaagataaaggacagt

SEQ ID NO: 1151 - DNA, 25 bp, Artificial Sequence
  Description of Artificial Sequence: Synthetic oligonucleotide
agtaatccgtaccttgtgttttgtt

SEQ ID NO: 1152 - DNA, 25 bp, Artificial Sequence
  Description of Artificial Sequence: Synthetic oligonucleotide
taaaggacagtgaagtaatccgtac

SEQ ID NO: 1153 - DNA, 25 bp, Artificial Sequence
  Description of Artificial Sequence: Synthetic oligonucleotide
catttctgatatagaattgcaattt

SEQ ID NO: 1154 - DNA, 25 bp, Artificial Sequence
  Description of Artificial Sequence: Synthetic oligonucleotide
tatctttgacaattctgggtgcgag

SEQ ID NO: 1155 - DNA, 25 bp, Artificial Sequence
  Description of Artificial Sequence: Synthetic oligonucleotide
tctccccttggttctgcactgttgc

SEQ ID NO: 1156 - DNA, 25 bp, Artificial Sequence
  Description of Artificial Sequence: Synthetic oligonucleotide
aaccacaattcaatgaatccccgac

SEQ ID NO: 1157 - DNA, 25 bp, Artificial Sequence
  Description of Artificial Sequence: Synthetic oligonucleotide
ctcctgccaaccacaattcaatgaa

SEQ ID NO: 1158 - DNA, 25 bp, Artificial Sequence
  Description of Artificial Sequence: Synthetic oligonucleotide
gactgagggatcgtagatttttaca

SEQ ID NO: 1159 - DNA, 25 bp, Artificial Sequence
  Description of Artificial Sequence: Synthetic oligonucleotide
gctgtacttgtggttctctttttgt

SEQ ID NO: 1160 - DNA, 25 bp, Artificial Sequence
  Description of Artificial Sequence: Synthetic oligonucleotide
gtgagactgagggatcgtagatttt

SEQ ID NO: 1161 - DNA, 25 bp, Artificial Sequence
  Description of Artificial Sequence: Synthetic oligonucleotide
caatctgtatctttgacaattctgg

SEQ ID NO: 1162 - DNA, 25 bp, Artificial Sequence
  Description of Artificial Sequence: Synthetic oligonucleotide
ttttgtattttgcatctgaccccgg

SEQ ID NO: 1163 - DNA, 25 bp, Artificial Sequence
  Description of Artificial Sequence: Synthetic oligonucleotide
ctgactctgggttcgttggggacat

SEQ ID NO: 1164 - DNA, 25 bp, Artificial Sequence
  Description of Artificial Sequence: Synthetic oligonucleotide
tttgacaattctgggtgcgagtgtg

SEQ ID NO: 1165 - DNA, 25 bp, Artificial Sequence
  Description of Artificial Sequence: Synthetic oligonucleotide
cctttcctggtttccgaaaggcaat

SEQ ID NO: 1166 - DNA, 25 bp, Artificial Sequence
  Description of Artificial Sequence: Synthetic oligonucleotide
ttgtcgcgcgtctcccatcctgatc

SEQ ID NO: 1167 - DNA, 25 bp, Artificial Sequence
  Description of Artificial Sequence: Synthetic oligonucleotide
aaaacattccacgtgccccttgtcg

SEQ ID NO: 1168 - DNA, 25 bp, Artificial Sequence
  Description of Artificial Sequence: Synthetic oligonucleotide
cctccatccgtgctgcatgaaaaac

SEQ ID NO: 1169 - DNA, 25 bp, Artificial Sequence
  Description of Artificial Sequence: Synthetic oligonucleotide
gcccatccctgaccatggttttggc

SEQ ID NO: 1170 - DNA, 25 bp, Artificial Sequence
  Description of Artificial Sequence: Synthetic oligonucleotide
ttcctggtttccgaaaggcaattat

SEQ ID NO: 1171 - DNA, 25 bp, Artificial Sequence
  Description of Artificial Sequence: Synthetic oligonucleotide
tccatccgtgctgcatgaaaaacat

SEQ ID NO: 1172 - DNA, 25 bp, Artificial Sequence
  Description of Artificial Sequence: Synthetic oligonucleotide
gccctccatccgtgctgcatgaaaa

SEQ ID NO: 1173 - DNA, 25 bp, Artificial Sequence
  Description of Artificial Sequence: Synthetic oligonucleotide
aaaaacattccacgtgccccttgtc

SEQ ID NO: 1174 - DNA, 25 bp, Artificial Sequence
  Description of Artificial Sequence: Synthetic oligonucleotide
ctggtttccgaaaggcaattatatc

SEQ ID NO: 1175 - DNA, 25 bp, Artificial Sequence
  Description of Artificial Sequence: Synthetic oligonucleotide
cccatccctgaccatggttttggct

SEQ ID NO: 1176 - DNA, 25 bp, Artificial Sequence
  Description of Artificial Sequence: Synthetic oligonucleotide
aattttggcaaatcatactggtcac

SEQ ID NO: 1177 - DNA, 25 bp, Artificial Sequence
  Description of Artificial Sequence: Synthetic oligonucleotide
acaatatccaacaagcttttcacag

SEQ ID NO: 1178 - DNA, 25 bp, Artificial Sequence
  Description of Artificial Sequence: Synthetic oligonucleotide
atttcatggtgagtgcgctttagaa

SEQ ID NO: 1179 - DNA, 25 bp, Artificial Sequence
  Description of Artificial Sequence: Synthetic oligonucleotide
aaggtaacctttatccatttcatgg

SEQ ID NO: 1180 - DNA, 25 bp, Artificial Sequence
  Description of Artificial Sequence: Synthetic oligonucleotide
tttagggttcactcctggcaataaa

SEQ ID NO: 1181 - DNA, 25 bp, Artificial Sequence
  Description of Artificial Sequence: Synthetic oligonucleotide
ggcagggaacctcatagtatcttat

SEQ ID NO: 1182 - DNA, 25 bp, Artificial Sequence
  Description of Artificial Sequence: Synthetic oligonucleotide
gaattcatgcagtgcaaatccccaa

SEQ ID NO: 1183 - DNA, 25 bp, Artificial Sequence
  Description of Artificial Sequence: Synthetic oligonucleotide
aagcttttcacagaattcatgcagt

SEQ ID NO: 1184 - DNA, 25 bp, Artificial Sequence
  Description of Artificial Sequence: Synthetic oligonucleotide
gcactcttgtgagccactttagggt

SEQ ID NO: 1185 - DNA, 25 bp, Artificial Sequence
  Description of Artificial Sequence: Synthetic oligonucleotide
atactggtcacttatctcaactttg

SEQ ID NO: 1186 - DNA, 25 bp, Artificial Sequence
  Description of Artificial Sequence: Synthetic oligonucleotide
aagaaatagggcactcttgtgagcc

SEQ ID NO: 1187 - DNA, 25 bp, Artificial Sequence
  Description of Artificial Sequence: Synthetic oligonucleotide
tccccatgttaagggatgatggctt

SEQ ID NO: 1188 - DNA, 25 bp, Artificial Sequence
  Description of Artificial Sequence: Synthetic oligonucleotide
tttcacattatttttgtacactttc

SEQ ID NO: 1189 - DNA, 25 bp, Artificial Sequence
  Description of Artificial Sequence: Synthetic oligonucleotide
atttttgtacactttccccatgtta

SEQ ID NO: 1190 - DNA, 25 bp, Artificial Sequence
  Description of Artificial Sequence: Synthetic oligonucleotide
catgttaagggatgatggcttttat

SEQ ID NO: 1191 - DNA, 25 bp, Artificial Sequence
  Description of Artificial Sequence: Synthetic oligonucleotide
actgctgatatgtttcctgtattct

SEQ ID NO: 1192 - DNA, 25 bp, Artificial Sequence
  Description of Artificial Sequence: Synthetic oligonucleotide
acattatttttgtacactttcccca

SEQ ID NO: 1193 - DNA, 25 bp, Artificial Sequence
  Description of Artificial Sequence: Synthetic oligonucleotide
gatatgtttcctgtattctagaaaa

SEQ ID NO: 1194 - DNA, 25 bp, Artificial Sequence
  Description of Artificial Sequence: Synthetic oligonucleotide
gttaaactaaacttctttactgctg

SEQ ID NO: 1195 - DNA, 25 bp, Artificial Sequence
  Description of Artificial Sequence: Synthetic oligonucleotide
ttctttactgctgatatgtttcctg

SEQ ID NO: 1196 - DNA, 25 bp, Artificial Sequence
  Description of Artificial Sequence: Synthetic oligonucleotide
aaactaaacttctttactgctgata

SEQ ID NO: 1197 - DNA, 25 bp, Artificial Sequence
  Description of Artificial Sequence: Synthetic oligonucleotide
gtacactttccccatgttaagggat

SEQ ID NO: 1198 - DNA, 25 bp, Artificial Sequence
  Description of Artificial Sequence: Synthetic oligonucleotide
gcattggttgattaaagtttaggta

SEQ ID NO: 1199 - DNA, 25 bp, Artificial Sequence
  Description of Artificial Sequence: Synthetic oligonucleotide
attaaagtttaggtaccatccaggc

SEQ ID NO: 1200 - DNA, 25 bp, Artificial Sequence
  Description of Artificial Sequence: Synthetic oligonucleotide
aatagaaaatgccatccataggtaa

SEQ ID NO: 1201 - DNA, 25 bp, Artificial Sequence
  Description of Artificial Sequence: Synthetic oligonucleotide
agtaatgtgtttatcctggctcata

SEQ ID NO: 1202 - DNA, 25 bp, Artificial Sequence
  Description of Artificial Sequence: Synthetic oligonucleotide
gtccgtcaccgaaaatagaaaatgc

SEQ ID NO: 1203 - DNA, 25 bp, Artificial Sequence
  Description of Artificial Sequence: Synthetic oligonucleotide
tttatcctggctcatagtccgtcac

SEQ ID NO: 1204 - DNA, 25 bp, Artificial Sequence
  Description of Artificial Sequence: Synthetic oligonucleotide
atgtgtttatcctggctcatagtcc

SEQ ID NO: 1205 - DNA, 25 bp, Artificial Sequence
  Description of Artificial Sequence: Synthetic oligonucleotide
ggttgattaaagtttaggtaccatc

SEQ ID NO: 1206 - DNA, 25 bp, Artificial Sequence
  Description of Artificial Sequence: Synthetic oligonucleotide
accgaaaatagaaaatgccatccat

SEQ ID NO: 1207 - DNA, 25 bp, Artificial Sequence
  Description of Artificial Sequence: Synthetic oligonucleotide
ggctcatagtccgtcaccgaaaata

SEQ ID NO: 1208 - DNA, 25 bp, Artificial Sequence
  Description of Artificial Sequence: Synthetic oligonucleotide
aatgccatccataggtaaaatgctg

SEQ ID NO: 1209 - DNA, 25 bp, Artificial Sequence
  Description of Artificial Sequence: Synthetic oligonucleotide
gtgttttattgtgtcagcaccaaat

SEQ ID NO: 1210 - DNA, 25 bp, Artificial Sequence
  Description of Artificial Sequence: Synthetic oligonucleotide
tctgtctttgtactggaatcgaaat

SEQ ID NO: 1211 - DNA, 25 bp, Artificial Sequence
  Description of Artificial Sequence: Synthetic oligonucleotide
gagctaactcgtgacactatgcagt

SEQ ID NO: 1212 - DNA, 25 bp, Artificial Sequence
  Description of Artificial Sequence: Synthetic oligonucleotide
acgtgcttaagagctaactcgtgac

SEQ ID NO: 1213 - DNA, 25 bp, Artificial Sequence
  Description of Artificial Sequence: Synthetic oligonucleotide
atttgtggacgttccttgtcacagg

SEQ ID NO: 1214 - DNA, 25 bp, Artificial Sequence
  Description of Artificial Sequence: Synthetic oligonucleotide
gtgcattatttgtggacgttccttg

SEQ ID NO: 1215 - DNA, 25 bp, Artificial Sequence
  Description of Artificial Sequence: Synthetic oligonucleotide
aacagatcaaacgtgcttaagagct

SEQ ID NO: 1216 - DNA, 25 bp, Artificial Sequence
  Description of Artificial Sequence: Synthetic oligonucleotide
gtgacactatgcagtattgtttgaa

SEQ ID NO: 1217 - DNA, 25 bp, Artificial Sequence
  Description of Artificial Sequence: Synthetic oligonucleotide
cagaacttgtcctgatggtgtttta

SEQ ID NO: 1218 - DNA, 25 bp, Artificial Sequence
  Description of Artificial Sequence: Synthetic oligonucleotide
gaagacctgttgttcaacctctgtc

SEQ ID NO: 1219 - DNA, 25 bp, Artificial Sequence
  Description of Artificial Sequence: Synthetic oligonucleotide
tctgtctctttatgttaactggatt

SEQ ID NO: 1220 - DNA, 25 bp, Artificial Sequence
  Description of Artificial Sequence: Synthetic oligonucleotide
tttgaatgtctttcactccttttaa

SEQ ID NO: 1221 - DNA, 25 bp, Artificial Sequence
  Description of Artificial Sequence: Synthetic oligonucleotide
tcttattcatctatacttgcagtgg

SEQ ID NO: 1222 - DNA, 25 bp, Artificial Sequence
  Description of Artificial Sequence: Synthetic oligonucleotide
tgaatgtctttcactccttttaagg

SEQ ID NO: 1223 - DNA, 25 bp, Artificial Sequence
  Description of Artificial Sequence: Synthetic oligonucleotide
gtgtcttattcatctatacttgcag

SEQ ID NO: 1224 - DNA, 25 bp, Artificial Sequence
  Description of Artificial Sequence: Synthetic oligonucleotide
gaatgtctttcactccttttaagga

SEQ ID NO: 1225 - DNA, 25 bp, Artificial Sequence
  Description of Artificial Sequence: Synthetic oligonucleotide
atgtctttcactccttttaaggata

SEQ ID NO: 1226 - DNA, 25 bp, Artificial Sequence
  Description of Artificial Sequence: Synthetic oligonucleotide
cttattcatctatacttgcagtggg

SEQ ID NO: 1227 - DNA, 25 bp, Artificial Sequence
  Description of Artificial Sequence: Synthetic oligonucleotide
tgtcttattcatctatacttgcagt

SEQ ID NO: 1228 - DNA, 25 bp, Artificial Sequence
  Description of Artificial Sequence: Synthetic oligonucleotide
ttgaatgtctttcactccttttaag

SEQ ID NO: 1229 - DNA, 25 bp, Artificial Sequence
  Description of Artificial Sequence: Synthetic oligonucleotide
gtcttattcatctatacttgcagtg

SEQ ID NO: 1230 - DNA, 25 bp, Artificial Sequence
  Description of Artificial Sequence: Synthetic oligonucleotide
aatgtctttcactccttttaaggat

SEQ ID NO: 1231 - DNA, 25 bp, Artificial Sequence
  Description of Artificial Sequence: Synthetic oligonucleotide
tcatgatgtgtgagtgtaattccat

SEQ ID NO: 1232 - DNA, 25 bp, Artificial Sequence
  Description of Artificial Sequence: Synthetic oligonucleotide
tatttttttaccacacctggaaaca

SEQ ID NO: 1233 - DNA, 25 bp, Artificial Sequence
  Description of Artificial Sequence: Synthetic oligonucleotide
tatatgcttttggaagttaaaattt

SEQ ID NO: 1234 - DNA, 25 bp, Artificial Sequence
  Description of Artificial Sequence: Synthetic oligonucleotide
tgtgtgagtgtaattccatgtggat

SEQ ID NO: 1235 - DNA, 25 bp, Artificial Sequence
  Description of Artificial Sequence: Synthetic oligonucleotide
tttgccacatacatagatcttcatg

SEQ ID NO: 1236 - DNA, 25 bp, Artificial Sequence
  Description of Artificial Sequence: Synthetic oligonucleotide
gtgccttccaaacctgagaatatat

SEQ ID NO: 1237 - DNA, 25 bp, Artificial Sequence
  Description of Artificial Sequence: Synthetic oligonucleotide
tgatgtgtgagtgtaattccatgtg

SEQ ID NO: 1238 - DNA, 25 bp, Artificial Sequence
  Description of Artificial Sequence: Synthetic oligonucleotide
ccttccaaacctgagaatatatgct

SEQ ID NO: 1239 - DNA, 25 bp, Artificial Sequence
  Description of Artificial Sequence: Synthetic oligonucleotide
atagatcttcatgatgtgtgagtgt

SEQ ID NO: 1240 - DNA, 25 bp, Artificial Sequence
  Description of Artificial Sequence: Synthetic oligonucleotide
gatcttcatgatgtgtgagtgtaat

SEQ ID NO: 1241 - DNA, 25 bp, Artificial Sequence
  Description of Artificial Sequence: Synthetic oligonucleotide
gccacatacatagatcttcatgatg

SEQ ID NO: 1242 - DNA, 25 bp, Artificial Sequence
  Description of Artificial Sequence: Synthetic oligonucleotide
ttatggcccaaaatgaccaacgaaa

SEQ ID NO: 1243 - DNA, 25 bp, Artificial Sequence
  Description of Artificial Sequence: Synthetic oligonucleotide
tcatgatgtgtgagtgtaattccat

SEQ ID NO: 1244 - DNA, 25 bp, Artificial Sequence
  Description of Artificial Sequence: Synthetic oligonucleotide
tatttttttaccacacctggaaaca

SEQ ID NO: 1245 - DNA, 25 bp, Artificial Sequence
  Description of Artificial Sequence: Synthetic oligonucleotide
tgtgtgagtgtaattccatgtggat

SEQ ID NO: 1246 - DNA, 25 bp, Artificial Sequence
  Description of Artificial Sequence: Synthetic oligonucleotide
tttgccacatacatagatcttcatg

SEQ ID NO: 1247 - DNA, 25 bp, Artificial Sequence
  Description of Artificial Sequence: Synthetic oligonucleotide
gtgccttccaaacctgagaatatat

SEQ ID NO: 1248 - DNA, 25 bp, Artificial Sequence
  Description of Artificial Sequence: Synthetic oligonucleotide
atagatcttcatgatgtgtgagtgt

SEQ ID NO: 1249 - DNA, 25 bp, Artificial Sequence
  Description of Artificial Sequence: Synthetic oligonucleotide
tggcttttgccacatacatagatct

SEQ ID NO: 1250 - DNA, 25 bp, Artificial Sequence
  Description of Artificial Sequence: Synthetic oligonucleotide
acctgagaatatatgcttttggaag

SEQ ID NO: 1251 - DNA, 25 bp, Artificial Sequence
  Description of Artificial Sequence: Synthetic oligonucleotide
attccatgtggatatcagttaccaa

SEQ ID NO: 1252 - DNA, 25 bp, Artificial Sequence
  Description of Artificial Sequence: Synthetic oligonucleotide
cctggaaacagaccaatagacattt

SEQ ID NO: 1253 - DNA, 25 bp, Artificial Sequence
  Description of Artificial Sequence: Synthetic oligonucleotide
actcaagcaatcctgaggaatactg

SEQ ID NO: 1254 - DNA, 25 bp, Artificial Sequence
  Description of Artificial Sequence: Synthetic oligonucleotide
ttgcaaggcgtacctccaaacataa

SEQ ID NO: 1255 - DNA, 25 bp, Artificial Sequence
  Description of Artificial Sequence: Synthetic oligonucleotide
ggaatactgagggagggcctggcta

SEQ ID NO: 1256 - DNA, 25 bp, Artificial Sequence
  Description of Artificial Sequence: Synthetic oligonucleotide
cactcaagcaatcctgaggaatact

SEQ ID NO: 1257 - DNA, 25 bp, Artificial Sequence
  Description of Artificial Sequence: Synthetic oligonucleotide
gaggaatactgagggagggcctggc

SEQ ID NO: 1258 - DNA, 25 bp, Artificial Sequence
  Description of Artificial Sequence: Synthetic oligonucleotide
aaggcgtacctccaaacataattga

SEQ ID NO: 1259 - DNA, 25 bp, Artificial Sequence
  Description of Artificial Sequence: Synthetic oligonucleotide
ctcttgcaaggcgtacctccaaaca

SEQ ID NO: 1260 - DNA, 25 bp, Artificial Sequence
  Description of Artificial Sequence: Synthetic oligonucleotide
agactcctcttgcaaggcgtacctc

SEQ ID NO: 1261 - DNA, 25 bp, Artificial Sequence
  Description of Artificial Sequence: Synthetic oligonucleotide
tcaagcaatcctgaggaatactgag

SEQ ID NO: 1262 - DNA, 25 bp, Artificial Sequence
  Description of Artificial Sequence: Synthetic oligonucleotide
gcagactcctcttgcaaggcgtacc

SEQ ID NO: 1263 - DNA, 25 bp, Artificial Sequence
  Description of Artificial Sequence: Synthetic oligonucleotide
ggcgtacctccaaacataattgatt

SEQ ID NO: 1264 - DNA, 25 bp, Artificial Sequence
  Description of Artificial Sequence: Synthetic oligonucleotide
ttttccttttggtcctctctaggtg

SEQ ID NO: 1265 - DNA, 25 bp, Artificial Sequence
  Description of Artificial Sequence: Synthetic oligonucleotide
ggtagatggttttgatttgtctgtt

SEQ ID NO: 1266 - DNA, 25 bp, Artificial Sequence
  Description of Artificial Sequence: Synthetic oligonucleotide
gtttcagcgatttttcaggtagatg

SEQ ID NO: 1267 - DNA, 25 bp, Artificial Sequence
  Description of Artificial Sequence: Synthetic oligonucleotide
cagcgatttttcaggtagatggttt

SEQ ID NO: 1268 - DNA, 25 bp, Artificial Sequence
  Description of Artificial Sequence: Synthetic oligonucleotide
gatggttttgatttgtctgttttcc

SEQ ID NO: 1269 - DNA, 25 bp, Artificial Sequence
  Description of Artificial Sequence: Synthetic oligonucleotide
ggtcctctctaggtgggctctcctt

SEQ ID NO: 1270 - DNA, 25 bp, Artificial Sequence
  Description of Artificial Sequence: Synthetic oligonucleotide
tttggtcctctctaggtgggctctc

SEQ ID NO: 1271 - DNA, 25 bp, Artificial Sequence
  Description of Artificial Sequence: Synthetic oligonucleotide
ttgatttgtctgttttccttttggt

SEQ ID NO: 1272 - DNA, 25 bp, Artificial Sequence
  Description of Artificial Sequence: Synthetic oligonucleotide
tttcaggtagatggttttgatttgt

SEQ ID NO: 1273 - DNA, 25 bp, Artificial Sequence
  Description of Artificial Sequence: Synthetic oligonucleotide
tttcagcgatttttcaggtagatgg

SEQ ID NO: 1274 - DNA, 25 bp, Artificial Sequence
  Description of Artificial Sequence: Synthetic oligonucleotide
tgtctgttttccttttggtcctctc

SEQ ID NO: 1275 - DNA, 25 bp, Artificial Sequence
  Description of Artificial Sequence: Synthetic oligonucleotide
ggattgctggattgtttggtcattt

SEQ ID NO: 1276 - DNA, 25 bp, Artificial Sequence
  Description of Artificial Sequence: Synthetic oligonucleotide
gacgtgccttggctgatgcgaataa

SEQ ID NO: 1277 - DNA, 25 bp, Artificial Sequence
  Description of Artificial Sequence: Synthetic oligonucleotide
gtgtgtttatccgtgcatcatgaag

SEQ ID NO: 1278 - DNA, 25 bp, Artificial Sequence
  Description of Artificial Sequence: Synthetic oligonucleotide
tgtttatccgtgcatcatgaaggac

SEQ ID NO: 1279 - DNA, 25 bp, Artificial Sequence
  Description of Artificial Sequence: Synthetic oligonucleotide
cagtgtgtttatccgtgcatcatga

SEQ ID NO: 1280 - DNA, 25 bp, Artificial Sequence
  Description of Artificial Sequence: Synthetic oligonucleotide
aggattgctggattgtttggtcatt

SEQ ID NO: 1281 - DNA, 25 bp, Artificial Sequence
  Description of Artificial Sequence: Synthetic oligonucleotide
tgacgtgccttggctgatgcgaata

SEQ ID NO: 1282 - DNA, 25 bp, Artificial Sequence
  Description of Artificial Sequence: Synthetic oligonucleotide
agatagctcttggaaatacccattt

SEQ ID NO: 1283 - DNA, 25 bp, Artificial Sequence
  Description of Artificial Sequence: Synthetic oligonucleotide
acgtgccttggctgatgcgaataac

SEQ ID NO: 1284 - DNA, 25 bp, Artificial Sequence
  Description of Artificial Sequence: Synthetic oligonucleotide
tttatccgtgcatcatgaaggaccc

SEQ ID NO: 1285 - DNA, 25 bp, Artificial Sequence
  Description of Artificial Sequence: Synthetic oligonucleotide
cagatagctcttggaaatacccatt

SEQ ID NO: 1286 - DNA, 25 bp, Artificial Sequence
  Description of Artificial Sequence: Synthetic oligonucleotide
ttgtgccccctgactggcttgtggg

SEQ ID NO: 1287 - DNA, 25 bp, Artificial Sequence
  Description of Artificial Sequence: Synthetic oligonucleotide
gggtctttctctcaccatgcatggc

SEQ ID NO: 1288 - DNA, 25 bp, Artificial Sequence
  Description of Artificial Sequence: Synthetic oligonucleotide
gtctttctctcaccatgcatggcct

SEQ ID NO: 1289 - DNA, 25 bp, Artificial Sequence
  Description of Artificial Sequence: Synthetic oligonucleotide
gcctgtggctctgtcagcaaacgtt

SEQ ID NO: 1290 - DNA, 25 bp, Artificial Sequence
  Description of Artificial Sequence: Synthetic oligonucleotide
ctgtggctctgtcagcaaacgtttt

SEQ ID NO: 1291 - DNA, 25 bp, Artificial Sequence
  Description of Artificial Sequence: Synthetic oligonucleotide
aaggccacctagtaagtgttttagg

SEQ ID NO: 1292 - DNA, 25 bp, Artificial Sequence
  Description of Artificial Sequence: Synthetic oligonucleotide
aagtgttttaggcattgtgtgccat

SEQ ID NO: 1293 - DNA, 25 bp, Artificial Sequence
  Description of Artificial Sequence: Synthetic oligonucleotide
gcagatgtcaatacattggcaaatg

SEQ ID NO: 1294 - DNA, 25 bp, Artificial Sequence
  Description of Artificial Sequence: Synthetic oligonucleotide
atgtcaatacattggcaaatggctg

SEQ ID NO: 1295 - DNA, 25 bp, Artificial Sequence
  Description of Artificial Sequence: Synthetic oligonucleotide
gcaaatggctgtgactatgtttcaa

SEQ ID NO: 1296 - DNA, 25 bp, Artificial Sequence
  Description of Artificial Sequence: Synthetic oligonucleotide
aaatggctgtgactatgtttcaata

SEQ ID NO: 1297 - DNA, 25 bp, Artificial Sequence
  Description of Artificial Sequence: Synthetic oligonucleotide
taccataattttgctcattgaaggc

SEQ ID NO: 1298 - DNA, 25 bp, Artificial Sequence
  Description of Artificial Sequence: Synthetic oligonucleotide
gcaacctctagcgattaccataatt

SEQ ID NO: 1299 - DNA, 25 bp, Artificial Sequence
  Description of Artificial Sequence: Synthetic oligonucleotide
ttgcataataggcaacctctagcga

SEQ ID NO: 1300 - DNA, 25 bp, Artificial Sequence
  Description of Artificial Sequence: Synthetic oligonucleotide
taataggcaacctctagcgattacc

SEQ ID NO: 1301 - DNA, 25 bp, Artificial Sequence
  Description of Artificial Sequence: Synthetic oligonucleotide
tagcgattaccataattttgctcat

SEQ ID NO: 1302 - DNA, 25 bp, Artificial Sequence
  Description of Artificial Sequence: Synthetic oligonucleotide
acctctagcgattaccataattttg

SEQ ID NO: 1303 - DNA, 25 bp, Artificial Sequence
  Description of Artificial Sequence: Synthetic oligonucleotide
cgattaccataattttgctcattga

SEQ ID NO: 1304 - DNA, 25 bp, Artificial Sequence
  Description of Artificial Sequence: Synthetic oligonucleotide
aggcaacctctagcgattaccataa

SEQ ID NO: 1305 - DNA, 25 bp, Artificial Sequence
  Description of Artificial Sequence: Synthetic oligonucleotide
cattgaaggctatctccagttgatc

SEQ ID NO: 1306 - DNA, 25 bp, Artificial Sequence
  Description of Artificial Sequence: Synthetic oligonucleotide
ccataattttgctcattgaaggcta

SEQ ID NO: 1307 - DNA, 25 bp, Artificial Sequence
  Description of Artificial Sequence: Synthetic oligonucleotide
tgcataataggcaacctctagcgat

SEQ ID NO: 1308 - DNA, 25 bp, Artificial Sequence
  Description of Artificial Sequence: Synthetic oligonucleotide
gtgactaattagttggcatattgtt

SEQ ID NO: 1309 - DNA, 25 bp, Artificial Sequence
  Description of Artificial Sequence: Synthetic oligonucleotide
aatatgtgaaaagtcgcccaaaatg

SEQ ID NO: 1310 - DNA, 25 bp, Artificial Sequence
  Description of Artificial Sequence: Synthetic oligonucleotide
tcatttctcaggatgcttcttacct

SEQ ID NO: 1311 - DNA, 25 bp, Artificial Sequence
  Description of Artificial Sequence: Synthetic oligonucleotide
aaagtcgcccaaaatgcaaccttga

SEQ ID NO: 1312 - DNA, 25 bp, Artificial Sequence
  Description of Artificial Sequence: Synthetic oligonucleotide
aggaggtgacaaggcagtctcttgc

SEQ ID NO: 1313 - DNA, 25 bp, Artificial Sequence
  Description of Artificial Sequence: Synthetic oligonucleotide
ccccattcctaaatatgtgaaaagt

SEQ ID NO: 1314 - DNA, 25 bp, Artificial Sequence
  Description of Artificial Sequence: Synthetic oligonucleotide
tctcttgctctcttggactcaccag

SEQ ID NO: 1315 - DNA, 25 bp, Artificial Sequence
  Description of Artificial Sequence: Synthetic oligonucleotide
gactcaccaggctcctattgaagga

SEQ ID NO: 1316 - DNA, 25 bp, Artificial Sequence
  Description of Artificial Sequence: Synthetic oligonucleotide
aaaagtctctcaaattaggccagat

SEQ ID NO: 1317 - DNA, 25 bp, Artificial Sequence
  Description of Artificial Sequence: Synthetic oligonucleotide
tgttcatttccaattgattctctac

SEQ ID NO: 1318 - DNA, 25 bp, Artificial Sequence
  Description of Artificial Sequence: Synthetic oligonucleotide
aggctcctattgaaggaaccacccc

SEQ ID NO: 1319 - DNA, 25 bp, Artificial Sequence
  Description of Artificial Sequence: Synthetic oligonucleotide
gtctcaatgcctgggactggaggtt

SEQ ID NO: 1320 - DNA, 25 bp, Artificial Sequence
  Description of Artificial Sequence: Synthetic oligonucleotide
ctgtgtctcaatgcctgggactgga

SEQ ID NO: 1321 - DNA, 25 bp, Artificial Sequence
  Description of Artificial Sequence: Synthetic oligonucleotide
gacccctgggtacatggtggatgat

SEQ ID NO: 1322 - DNA, 25 bp, Artificial Sequence
  Description of Artificial Sequence: Synthetic oligonucleotide
tgtctcaatgcctgggactggaggt

SEQ ID NO: 1323 - DNA, 25 bp, Artificial Sequence
  Description of Artificial Sequence: Synthetic oligonucleotide
tttaagtgtgttcttaccgcctcct

SEQ ID NO: 1324 - DNA, 25 bp, Artificial Sequence
  Description of Artificial Sequence: Synthetic oligonucleotide
tttcatacttgaagacggatataaa

SEQ ID NO: 1325 - DNA, 25 bp, Artificial Sequence
  Description of Artificial Sequence: Synthetic oligonucleotide
tatgtgtttctccagaatggtgcct

SEQ ID NO: 1326 - DNA, 25 bp, Artificial Sequence
  Description of Artificial Sequence: Synthetic oligonucleotide
ccctgggtacatggtggatgatttt

SEQ ID NO: 1327 - DNA, 25 bp, Artificial Sequence
  Description of Artificial Sequence: Synthetic oligonucleotide
gactggaggttgatagtttaagtgt

SEQ ID NO: 1328 - DNA, 25 bp, Artificial Sequence
  Description of Artificial Sequence: Synthetic oligonucleotide
cagacccctgggtacatggtggatg

SEQ ID NO: 1329 - DNA, 25 bp, Artificial Sequence
  Description of Artificial Sequence: Synthetic oligonucleotide
aagtgtgttcttaccgcctcctttt

SEQ ID NO: 1330 - DNA, 25 bp, Artificial Sequence
  Description of Artificial Sequence: Synthetic oligonucleotide
aggtgacttgtttactcattgaagc

SEQ ID NO: 1331 - DNA, 25 bp, Artificial Sequence
  Description of Artificial Sequence: Synthetic oligonucleotide
cttgcccttgagtgcttgttagaga

SEQ ID NO: 1332 - DNA, 25 bp, Artificial Sequence
  Description of Artificial Sequence: Synthetic oligonucleotide
cttgtttactcattgaagcagattt

SEQ ID NO: 1333 - DNA, 25 bp, Artificial Sequence
  Description of Artificial Sequence: Synthetic oligonucleotide
gtgcatgggttattttggagtgtag

SEQ ID NO: 1334 - DNA, 25 bp, Artificial Sequence
  Description of Artificial Sequence: Synthetic oligonucleotide
tgggttattttggagtgtaggtgac

SEQ ID NO: 1335 - DNA, 25 bp, Artificial Sequence
  Description of Artificial Sequence: Synthetic oligonucleotide
tccttgcccttgagtgcttgttaga

SEQ ID NO: 1336 - DNA, 25 bp, Artificial Sequence
  Description of Artificial Sequence: Synthetic oligonucleotide
gacttgtttactcattgaagcagat

SEQ ID NO: 1337 - DNA, 25 bp, Artificial Sequence
  Description of Artificial Sequence: Synthetic oligonucleotide
gcccttgagtgcttgttagagagaa

SEQ ID NO: 1338 - DNA, 25 bp, Artificial Sequence
  Description of Artificial Sequence: Synthetic oligonucleotide
gtaggtgacttgtttactcattgaa

SEQ ID NO: 1339 - DNA, 25 bp, Artificial Sequence
  Description of Artificial Sequence: Synthetic oligonucleotide
cttcaccccccaatctcttggtggg

SEQ ID NO: 1340 - DNA, 25 bp, Artificial Sequence
  Description of Artificial Sequence: Synthetic oligonucleotide
atgtcccccatcatgtggcccaact

SEQ ID NO: 1341 - DNA, 25 bp, Artificial Sequence
  Description of Artificial Sequence: Synthetic oligonucleotide
ttgcttgaagcaaacagttgacaat

SEQ ID NO: 1342 - DNA, 25 bp, Artificial Sequence
  Description of Artificial Sequence: Synthetic oligonucleotide
gaagcaaacagttgacaatttttaa

SEQ ID NO: 1343 - DNA, 25 bp, Artificial Sequence
  Description of Artificial Sequence: Synthetic oligonucleotide
ctgtataaaggtgtgctgtgtccac

SEQ ID NO: 1344 - DNA, 25 bp, Artificial Sequence
  Description of Artificial Sequence: Synthetic oligonucleotide
gctgctagaaatagtcatttgtgaa

SEQ ID NO: 1345 - DNA, 25 bp, Artificial Sequence
  Description of Artificial Sequence: Synthetic oligonucleotide
ttactgtataaaggtgtgctgtgtc

SEQ ID NO: 1346 - DNA, 25 bp, Artificial Sequence
  Description of Artificial Sequence: Synthetic oligonucleotide
gctagaaatagtcatttgtgaatta

SEQ ID NO: 1347 - DNA, 25 bp, Artificial Sequence
  Description of Artificial Sequence: Synthetic oligonucleotide
gttgctgctagaaatagtcatttgt

SEQ ID NO: 1348 - DNA, 25 bp, Artificial Sequence
  Description of Artificial Sequence: Synthetic oligonucleotide
gcaaacagttgacaatttttaacct

SEQ ID NO: 1349 - DNA, 25 bp, Artificial Sequence
  Description of Artificial Sequence: Synthetic oligonucleotide
cttcctttttgcttgaagcaaacag

SEQ ID NO: 1350 - DNA, 25 bp, Artificial Sequence
  Description of Artificial Sequence: Synthetic oligonucleotide
gtgtgttgctgctagaaatagtcat

SEQ ID NO: 1351 - DNA, 25 bp, Artificial Sequence
  Description of Artificial Sequence: Synthetic oligonucleotide
ggccttactgtataaaggtgtgctg

SEQ ID NO: 1352 - DNA, 25 bp, Artificial Sequence
  Description of Artificial Sequence: Synthetic oligonucleotide
ttgcttgaagcaaacagttgacaat

SEQ ID NO: 1353 - DNA, 25 bp, Artificial Sequence
  Description of Artificial Sequence: Synthetic oligonucleotide
ctgtataaaggtgtgctgtgtccac

SEQ ID NO: 1354 - DNA, 25 bp, Artificial Sequence
  Description of Artificial Sequence: Synthetic oligonucleotide
caaagtttatcttggccttactgta

SEQ ID NO: 1355 - DNA, 25 bp, Artificial Sequence
  Description of Artificial Sequence: Synthetic oligonucleotide
gctgctagaaatagtcatttgtgaa

SEQ ID NO: 1356 - DNA, 25 bp, Artificial Sequence
  Description of Artificial Sequence: Synthetic oligonucleotide
tttttgtactctgcagactgaaaag

SEQ ID NO: 1357 - DNA, 25 bp, Artificial Sequence
  Description of Artificial Sequence: Synthetic oligonucleotide
tgaagttgtgtgttgctgctagaaa

SEQ ID NO: 1358 - DNA, 25 bp, Artificial Sequence
  Description of Artificial Sequence: Synthetic oligonucleotide
gcaaacagttgacaatttttaacct

SEQ ID NO: 1359 - DNA, 25 bp, Artificial Sequence
  Description of Artificial Sequence: Synthetic oligonucleotide
gtgtgttgctgctagaaatagtcat

SEQ ID NO: 1360 - DNA, 25 bp, Artificial Sequence
  Description of Artificial Sequence: Synthetic oligonucleotide
ggccttactgtataaaggtgtgctg

SEQ ID NO: 1361 - DNA, 25 bp, Artificial Sequence
  Description of Artificial Sequence: Synthetic oligonucleotide
gctgtgtccaccgttgtgtacagaa

SEQ ID NO: 1362 - DNA, 25 bp, Artificial Sequence
  Description of Artificial Sequence: Synthetic oligonucleotide
gaagagctacttcattcttttctga

SEQ ID NO: 1363 - DNA, 25 bp, Artificial Sequence
  Description of Artificial Sequence: Synthetic oligonucleotide
tttgaggacaaacagatttgtcagc

SEQ ID NO: 1364 - DNA, 25 bp, Artificial Sequence
  Description of Artificial Sequence: Synthetic oligonucleotide
cttggtcgcagtgactgtggtgtcc

SEQ ID NO: 1365 - DNA, 25 bp, Artificial Sequence
  Description of Artificial Sequence: Synthetic oligonucleotide
agactggcttggtcgcagtgactgt

SEQ ID NO: 1366 - DNA, 25 bp, Artificial Sequence
  Description of Artificial Sequence: Synthetic oligonucleotide
acacagactggcttggtcgcagtga

SEQ ID NO: 1367 - DNA, 25 bp, Artificial Sequence
  Description of Artificial Sequence: Synthetic oligonucleotide
gatttgtcagctgtcagggtgcagt

SEQ ID NO: 1368 - DNA, 25 bp, Artificial Sequence
  Description of Artificial Sequence: Synthetic oligonucleotide
acgtcagagactatgtggtccatcg

SEQ ID NO: 1369 - DNA, 25 bp, Artificial Sequence
  Description of Artificial Sequence: Synthetic oligonucleotide
cagatttgtcagctgtcagggtgca

SEQ ID NO: 1370 - DNA, 25 bp, Artificial Sequence
  Description of Artificial Sequence: Synthetic oligonucleotide
gccttcattgtgtaaatgaggacac

SEQ ID NO: 1371 - DNA, 25 bp, Artificial Sequence
  Description of Artificial Sequence: Synthetic oligonucleotide
ggtccatcgccttcattgtgtaaat

SEQ ID NO: 1372 - DNA, 25 bp, Artificial Sequence
  Description of Artificial Sequence: Synthetic oligonucleotide
agactatgtggtccatcgccttcat

SEQ ID NO: 1373 - DNA, 25 bp, Artificial Sequence
  Description of Artificial Sequence: Synthetic oligonucleotide
tcagagactatgtggtccatcgcct

SEQ ID NO: 1374 - DNA, 25 bp, Artificial Sequence
  Description of Artificial Sequence: Synthetic oligonucleotide
gtttgttaaaacgatagctatattc

SEQ ID NO: 1375 - DNA, 25 bp, Artificial Sequence
  Description of Artificial Sequence: Synthetic oligonucleotide
ggacttttgaggttaaagacagtca

SEQ ID NO: 1376 - DNA, 25 bp, Artificial Sequence
  Description of Artificial Sequence: Synthetic oligonucleotide
gacagtcatataaacgtcctgtttc

SEQ ID NO: 1377 - DNA, 25 bp, Artificial Sequence
  Description of Artificial Sequence: Synthetic oligonucleotide
gtcatataaacgtcctgtttctgtt

SEQ ID NO: 1378 - DNA, 25 bp, Artificial Sequence
  Description of Artificial Sequence: Synthetic oligonucleotide
aactcctagtacttagaaatacacg

SEQ ID NO: 1379 - DNA, 25 bp, Artificial Sequence
  Description of Artificial Sequence: Synthetic oligonucleotide
tacacgtatggttaatgttcagtcc

SEQ ID NO: 1380 - DNA, 25 bp, Artificial Sequence
  Description of Artificial Sequence: Synthetic oligonucleotide
gtatggttaatgttcagtccaacaa

SEQ ID NO: 1381 - DNA, 25 bp, Artificial Sequence
  Description of Artificial Sequence: Synthetic oligonucleotide
aacaaaccacacacagtaaatgttt

SEQ ID NO: 1382 - DNA, 25 bp, Artificial Sequence
  Description of Artificial Sequence: Synthetic oligonucleotide
tgtttattaatagtcatggttcgta

SEQ ID NO: 1383 - DNA, 25 bp, Artificial Sequence
  Description of Artificial Sequence: Synthetic oligonucleotide
atagtcatggttcgtattttaggtg

SEQ ID NO: 1384 - DNA, 25 bp, Artificial Sequence
  Description of Artificial Sequence: Synthetic oligonucleotide
tcatggttcgtattttaggtgactg

SEQ ID NO: 1385 - DNA, 25 bp, Artificial Sequence
  Description of Artificial Sequence: Synthetic oligonucleotide
gaataggctctgctaacgtgatgag

SEQ ID NO: 1386 - DNA, 25 bp, Artificial Sequence
  Description of Artificial Sequence: Synthetic oligonucleotide
aataggctctgctaacgtgatgaga

SEQ ID NO: 1387 - DNA, 25 bp, Artificial Sequence
  Description of Artificial Sequence: Synthetic oligonucleotide
ataggctctgctaacgtgatgagac

SEQ ID NO: 1388 - DNA, 25 bp, Artificial Sequence
  Description of Artificial Sequence: Synthetic oligonucleotide
aggctctgctaacgtgatgagacaa

SEQ ID NO: 1389 - DNA, 25 bp, Artificial Sequence
  Description of Artificial Sequence: Synthetic oligonucleotide
ggctctgctaacgtgatgagacaaa

SEQ ID NO: 1390 - DNA, 25 bp, Artificial Sequence
  Description of Artificial Sequence: Synthetic oligonucleotide
ccaggggttcattttcatgagcctg

SEQ ID NO: 1391 - DNA, 25 bp, Artificial Sequence
  Description of Artificial Sequence: Synthetic oligonucleotide
gggttcattttcatgagcctgtcca

SEQ ID NO: 1392 - DNA, 25 bp, Artificial Sequence
  Description of Artificial Sequence: Synthetic oligonucleotide
gttcattttcatgagcctgtccagg

SEQ ID NO: 1393 - DNA, 25 bp, Artificial Sequence
  Description of Artificial Sequence: Synthetic oligonucleotide
attttcatgagcctgtccaggttag

SEQ ID NO: 1394 - DNA, 25 bp, Artificial Sequence
  Description of Artificial Sequence: Synthetic oligonucleotide
ttttcatgagcctgtccaggttagt

SEQ ID NO: 1395 - DNA, 25 bp, Artificial Sequence
  Description of Artificial Sequence: Synthetic oligonucleotide
tttcatgagcctgtccaggttagtt

SEQ ID NO: 1396 - DNA, 25 bp, Artificial Sequence
  Description of Artificial Sequence: Synthetic oligonucleotide
gagatgtgaacacatcagcttgccc

SEQ ID NO: 1397 - DNA, 25 bp, Artificial Sequence
  Description of Artificial Sequence: Synthetic oligonucleotide
tgagatgtgaacacatcagcttgcc

SEQ ID NO: 1398 - DNA, 25 bp, Artificial Sequence
  Description of Artificial Sequence: Synthetic oligonucleotide
aaaaatactgatgttcctagtgaaa

SEQ ID NO: 1399 - DNA, 25 bp, Artificial Sequence
  Description of Artificial Sequence: Synthetic oligonucleotide
atcagcttgccctgttaaaagatga

SEQ ID NO: 1400 - DNA, 25 bp, Artificial Sequence
  Description of Artificial Sequence: Synthetic oligonucleotide
catcagcttgccctgttaaaagatg

SEQ ID NO: 1401 - DNA, 25 bp, Artificial Sequence
  Description of Artificial Sequence: Synthetic oligonucleotide
aaaatactgatgttcctagtgaaag

SEQ ID NO: 1402 - DNA, 25 bp, Artificial Sequence
  Description of Artificial Sequence: Synthetic oligonucleotide
aagaggcagcttgaaactgagatgt

SEQ ID NO: 1403 - DNA, 25 bp, Artificial Sequence
  Description of Artificial Sequence: Synthetic oligonucleotide
taacttgaaggagtccttgcatcaa

SEQ ID NO: 1404 - DNA, 25 bp, Artificial Sequence
  Description of Artificial Sequence: Synthetic oligonucleotide
actgatgttcctagtgaaagaggca

SEQ ID NO: 1405 - DNA, 25 bp, Artificial Sequence
  Description of Artificial Sequence: Synthetic oligonucleotide
tagtgaaagaggcagcttgaaactg

SEQ ID NO: 1406 - DNA, 25 bp, Artificial Sequence
  Description of Artificial Sequence: Synthetic oligonucleotide
ttaacttgaaggagtccttgcatca

SEQ ID NO: 1407 - DNA, 25 bp, Artificial Sequence
  Description of Artificial Sequence: Synthetic oligonucleotide
gaattatctaatcaacatcatcctc

SEQ ID NO: 1408 - DNA, 25 bp, Artificial Sequence
  Description of Artificial Sequence: Synthetic oligonucleotide
aggctgggaagcatctcaagatctt

SEQ ID NO: 1409 - DNA, 25 bp, Artificial Sequence
  Description of Artificial Sequence: Synthetic oligonucleotide
tcaagatctttccagggttatactt

SEQ ID NO: 1410 - DNA, 25 bp, Artificial Sequence
  Description of Artificial Sequence: Synthetic oligonucleotide
tttccagggttatacttactagcac

SEQ ID NO: 1411 - DNA, 25 bp, Artificial Sequence
  Description of Artificial Sequence: Synthetic oligonucleotide
tcaatgttacatgcagctatgggaa

SEQ ID NO: 1412 - DNA, 25 bp, Artificial Sequence
  Description of Artificial Sequence: Synthetic oligonucleotide
gcacacagcatgatcattacggagt

SEQ ID NO: 1413 - DNA, 25 bp, Artificial Sequence
  Description of Artificial Sequence: Synthetic oligonucleotide
ggttatacttactagcacacagcat

SEQ ID NO: 1414 - DNA, 25 bp, Artificial Sequence
  Description of Artificial Sequence: Synthetic oligonucleotide
gatcattacggagtgaattatctaa

SEQ ID NO: 1415 - DNA, 25 bp, Artificial Sequence
  Description of Artificial Sequence: Synthetic oligonucleotide
atcaacatcatcctcagtgtctttg

SEQ ID NO: 1416 - DNA, 25 bp, Artificial Sequence
  Description of Artificial Sequence: Synthetic oligonucleotide
gcccattctcaagacctcaaaatgt

SEQ ID NO: 1417 - DNA, 25 bp, Artificial Sequence
  Description of Artificial Sequence: Synthetic oligonucleotide
aaattcatttcccacttttgtgccc

SEQ ID NO: 1418 - DNA, 25 bp, Artificial Sequence
  Description of Artificial Sequence: Synthetic oligonucleotide
tgcctaaactgtgcgttcataacca

SEQ ID NO: 1419 - DNA, 25 bp, Artificial Sequence
  Description of Artificial Sequence: Synthetic oligonucleotide
tggatatttatttgaacgggattac

SEQ ID NO: 1420 - DNA, 25 bp, Artificial Sequence
  Description of Artificial Sequence: Synthetic oligonucleotide
ggaaaacagatcctgttgtggatat

SEQ ID NO: 1421 - DNA, 25 bp, Artificial Sequence
  Description of Artificial Sequence: Synthetic oligonucleotide
aaacagacgagaaaatcttgatggc

SEQ ID NO: 1422 - DNA, 25 bp, Artificial Sequence
  Description of Artificial Sequence: Synthetic oligonucleotide
aggattctggccctgctgcctaaac

SEQ ID NO: 1423 - DNA, 25 bp, Artificial Sequence
  Description of Artificial Sequence: Synthetic oligonucleotide
aagtgagcattaccaatgagaggaa

SEQ ID NO: 1424 - DNA, 25 bp, Artificial Sequence
  Description of Artificial Sequence: Synthetic oligonucleotide
gtcacaaagtgagcattaccaatga

SEQ ID NO: 1425 - DNA, 25 bp, Artificial Sequence
  Description of Artificial Sequence: Synthetic oligonucleotide
tgaattgatgtgttccttaaaggat

SEQ ID NO: 1426 - DNA, 25 bp, Artificial Sequence
  Description of Artificial Sequence: Synthetic oligonucleotide
gatgtgttccttaaaggatgggcag

SEQ ID NO: 1427 - DNA, 25 bp, Artificial Sequence
  Description of Artificial Sequence: Synthetic oligonucleotide
ttctggccctgctgcctaaactgtg

SEQ ID NO: 1428 - DNA, 25 bp, Artificial Sequence
  Description of Artificial Sequence: Synthetic oligonucleotide
tgcgttcataaccaaatcatttcat

SEQ ID NO: 1429 - DNA, 25 bp, Artificial Sequence
  Description of Artificial Sequence: Synthetic oligonucleotide
tagcttgagctatagcctttaattc

SEQ ID NO: 1430 - DNA, 25 bp, Artificial Sequence
  Description of Artificial Sequence: Synthetic oligonucleotide
tttaattccttactttggctatggg

SEQ ID NO: 1431 - DNA, 25 bp, Artificial Sequence
  Description of Artificial Sequence: Synthetic oligonucleotide
atcgcatcatgccaacttgtgactt

SEQ ID NO: 1432 - DNA, 25 bp, Artificial Sequence
  Description of Artificial Sequence: Synthetic oligonucleotide
gaggatatagtagccatgacatagc

SEQ ID NO: 1433 - DNA, 25 bp, Artificial Sequence
  Description of Artificial Sequence: Synthetic oligonucleotide
atagtagccatgacatagcttgagc

SEQ ID NO: 1434 - DNA, 25 bp, Artificial Sequence
  Description of Artificial Sequence: Synthetic oligonucleotide
tgattttcttgtaacctgggaaagc

SEQ ID NO: 1435 - DNA, 25 bp, Artificial Sequence
  Description of Artificial Sequence: Synthetic oligonucleotide
acctgggaaagccatgaccttgtgc

SEQ ID NO: 1436 - DNA, 25 bp, Artificial Sequence
  Description of Artificial Sequence: Synthetic oligonucleotide
tagcctttaattccttactttggct

SEQ ID NO: 1437 - DNA, 25 bp, Artificial Sequence
  Description of Artificial Sequence: Synthetic oligonucleotide
ctaaatcgcatcatgccaacttgtg

SEQ ID NO: 1438 - DNA, 25 bp, Artificial Sequence
  Description of Artificial Sequence: Synthetic oligonucleotide
taacctgggaaagccatgaccttgt

SEQ ID NO: 1439 - DNA, 25 bp, Artificial Sequence
  Description of Artificial Sequence: Synthetic oligonucleotide
atcatgccaacttgtgactttgaga

SEQ ID NO: 1440 - DNA, 25 bp, Artificial Sequence
  Description of Artificial Sequence: Synthetic oligonucleotide
atgagggctgagttatgaaaagata

SEQ ID NO: 1441 - DNA, 25 bp, Artificial Sequence
  Description of Artificial Sequence: Synthetic oligonucleotide
gaacgcaatgtttctagagacatat

SEQ ID NO: 1442 - DNA, 25 bp, Artificial Sequence
  Description of Artificial Sequence: Synthetic oligonucleotide
aaaatctgccactcagggtctggga

SEQ ID NO: 1443 - DNA, 25 bp, Artificial Sequence
  Description of Artificial Sequence: Synthetic oligonucleotide
cagcacttccagtttagaacgcaat

SEQ ID NO: 1444 - DNA, 25 bp, Artificial Sequence
  Description of Artificial Sequence: Synthetic oligonucleotide
gttccactgctactgacccagaggg

SEQ ID NO: 1445 - DNA, 25 bp, Artificial Sequence
  Description of Artificial Sequence: Synthetic oligonucleotide
gtctgggatgaaggcttgtcagcac

SEQ ID NO: 1446 - DNA, 25 bp, Artificial Sequence
  Description of Artificial Sequence: Synthetic oligonucleotide
taacttcatgaagacttaactggcc

SEQ ID NO: 1447 - DNA, 25 bp, Artificial Sequence
  Description of Artificial Sequence: Synthetic oligonucleotide
tgaaggcttgtcagcacttccagtt

SEQ ID NO: 1448 - DNA, 25 bp, Artificial Sequence
  Description of Artificial Sequence: Synthetic oligonucleotide
aaatctgccactcagggtctgggat

SEQ ID NO: 1449 - DNA, 25 bp, Artificial Sequence
  Description of Artificial Sequence: Synthetic oligonucleotide
ggtttcctggttccactgctactga

SEQ ID NO: 1450 - DNA, 25 bp, Artificial Sequence
  Description of Artificial Sequence: Synthetic oligonucleotide
gcacttccagtttagaacgcaatgt

SEQ ID NO: 1451 - DNA, 25 bp, Artificial Sequence
  Description of Artificial Sequence: Synthetic oligonucleotide
ttagatttcatccaggtaacgttga

SEQ ID NO: 1452 - DNA, 25 bp, Artificial Sequence
  Description of Artificial Sequence: Synthetic oligonucleotide
gatttcatccaggtaacgttgagag

SEQ ID NO: 1453 - DNA, 25 bp, Artificial Sequence
  Description of Artificial Sequence: Synthetic oligonucleotide
tccaggtaacgttgagagtaatgtc

SEQ ID NO: 1454 - DNA, 25 bp, Artificial Sequence
  Description of Artificial Sequence: Synthetic oligonucleotide
ggtaacgttgagagtaatgtcagga

SEQ ID NO: 1455 - DNA, 25 bp, Artificial Sequence
  Description of Artificial Sequence: Synthetic oligonucleotide
gagtaatgtcaggatctcaaatgga

SEQ ID NO: 1456 - DNA, 25 bp, Artificial Sequence
  Description of Artificial Sequence: Synthetic oligonucleotide
agtaatgtcaggatctcaaatggaa

SEQ ID NO: 1457 - DNA, 25 bp, Artificial Sequence
  Description of Artificial Sequence: Synthetic oligonucleotide
tcaaatggaaaacggaagttcctat

SEQ ID NO: 1458 - DNA, 25 bp, Artificial Sequence
  Description of Artificial Sequence: Synthetic oligonucleotide
attttttcaagcccttttcatgggg

SEQ ID NO: 1459 - DNA, 25 bp, Artificial Sequence
  Description of Artificial Sequence: Synthetic oligonucleotide
tcggcctggctgtgtgtaatgttaa

SEQ ID NO: 1460 - DNA, 25 bp, Artificial Sequence
  Description of Artificial Sequence: Synthetic oligonucleotide
cctggctgtgtgtaatgttaactta

SEQ ID NO: 1461 - DNA, 25 bp, Artificial Sequence
  Description of Artificial Sequence: Synthetic oligonucleotide
ggctgtgtgtaatgttaacttaata

SEQ ID NO: 1462 - DNA, 25 bp, Artificial Sequence
  Description of Artificial Sequence: Synthetic oligonucleotide
gaaagctccggtattattctttgat

SEQ ID NO: 1463 - DNA, 25 bp, Artificial Sequence
  Description of Artificial Sequence: Synthetic oligonucleotide
gctccggtattattctttgatagaa

SEQ ID NO: 1464 - DNA, 25 bp, Artificial Sequence
  Description of Artificial Sequence: Synthetic oligonucleotide
ttctttgatagaaatccaataggaa

SEQ ID NO: 1465 - DNA, 25 bp, Artificial Sequence
  Description of Artificial Sequence: Synthetic oligonucleotide
gaattttaaatcgtttctccaaaga

SEQ ID NO: 1466 - DNA, 25 bp, Artificial Sequence
  Description of Artificial Sequence: Synthetic oligonucleotide
ttaaatcgtttctccaaagacattg

SEQ ID NO: 1467 - DNA, 25 bp, Artificial Sequence
  Description of Artificial Sequence: Synthetic oligonucleotide
caaagacattggacacttggatgat

SEQ ID NO: 1468 - DNA, 25 bp, Artificial Sequence
  Description of Artificial Sequence: Synthetic oligonucleotide
agacattggacacttggatgatttg

SEQ ID NO: 1469 - DNA, 25 bp, Artificial Sequence
  Description of Artificial Sequence: Synthetic oligonucleotide
tggatgatttgctgccgctgacgtt

SEQ ID NO: 1470 - DNA, 25 bp, Artificial Sequence
  Description of Artificial Sequence: Synthetic oligonucleotide
atttgctgccgctgacgtttttaga

SEQ ID NO: 1471 - DNA, 25 bp, Artificial Sequence
  Description of Artificial Sequence: Synthetic oligonucleotide
gctgccgctgacgtttttagatttc

SEQ ID NO: 1472 - DNA, 25 bp, Artificial Sequence
  Description of Artificial Sequence: Synthetic oligonucleotide
gctgacgtttttagatttcatccag

SEQ ID NO: 1473 - DNA, 25 bp, Artificial Sequence
  Description of Artificial Sequence: Synthetic oligonucleotide
tttgggtaagcacctatttaagtgt

SEQ ID NO: 1474 - DNA, 25 bp, Artificial Sequence
  Description of Artificial Sequence: Synthetic oligonucleotide
gggtaagcacctatttaagtgtctt

SEQ ID NO: 1475 - DNA, 25 bp, Artificial Sequence
  Description of Artificial Sequence: Synthetic oligonucleotide
ggtaagcacctatttaagtgtctta

SEQ ID NO: 1476 - DNA, 25 bp, Artificial Sequence
  Description of Artificial Sequence: Synthetic oligonucleotide
ttttctattgagtactctgggtttt

SEQ ID NO: 1477 - DNA, 25 bp, Artificial Sequence
  Description of Artificial Sequence: Synthetic oligonucleotide
tttctattgagtactctgggttttt

SEQ ID NO: 1478 - DNA, 25 bp, Artificial Sequence
  Description of Artificial Sequence: Synthetic oligonucleotide
ttgaattgcagataccttccttctg

SEQ ID NO: 1479 - DNA, 25 bp, Artificial Sequence
  Description of Artificial Sequence: Synthetic oligonucleotide
tgaattgcagataccttccttctgt

SEQ ID NO: 1480 - DNA, 25 bp, Artificial Sequence
  Description of Artificial Sequence: Synthetic oligonucleotide
tgcagataccttccttctgtactaa

SEQ ID NO: 1481 - DNA, 25 bp, Artificial Sequence
  Description of Artificial Sequence: Synthetic oligonucleotide
agataccttccttctgtactaatgc

SEQ ID NO: 1482 - DNA, 25 bp, Artificial Sequence
  Description of Artificial Sequence: Synthetic oligonucleotide
tctgtactaatgcttatctttttag

SEQ ID NO: 1483 - DNA, 25 bp, Artificial Sequence
  Description of Artificial Sequence: Synthetic oligonucleotide
tgtactaatgcttatctttttagcc

SEQ ID NO: 1484 - DNA, 25 bp, Artificial Sequence
  Description of Artificial Sequence: Synthetic oligonucleotide
tttgggtaagcacctatttaagtgt

SEQ ID NO: 1485 - DNA, 25 bp, Artificial Sequence
  Description of Artificial Sequence: Synthetic oligonucleotide
gggtaagcacctatttaagtgtctt

SEQ ID NO: 1486 - DNA, 25 bp, Artificial Sequence
  Description of Artificial Sequence: Synthetic oligonucleotide
gtgtcttaacaatttttctattgag

SEQ ID NO: 1487 - DNA, 25 bp, Artificial Sequence
  Description of Artificial Sequence: Synthetic oligonucleotide
ttttctattgagtactctgggtttt

SEQ ID NO: 1488 - DNA, 25 bp, Artificial Sequence
  Description of Artificial Sequence: Synthetic oligonucleotide
tgaattgcagataccttccttctgt

SEQ ID NO: 1489 - DNA, 25 bp, Artificial Sequence
  Description of Artificial Sequence: Synthetic oligonucleotide
tgcagataccttccttctgtactaa

SEQ ID NO: 1490 - DNA, 25 bp, Artificial Sequence
  Description of Artificial Sequence: Synthetic oligonucleotide
agataccttccttctgtactaatgc

SEQ ID NO: 1491 - DNA, 25 bp, Artificial Sequence
  Description of Artificial Sequence: Synthetic oligonucleotide
tgtactaatgcttatctttttagcc

SEQ ID NO: 1492 - DNA, 25 bp, Artificial Sequence
  Description of Artificial Sequence: Synthetic oligonucleotide
aatgcttatctttttagccctgtaa

SEQ ID NO: 1493 - DNA, 25 bp, Artificial Sequence
  Description of Artificial Sequence: Synthetic oligonucleotide
aaacatacttatcaatcttttcctt

SEQ ID NO: 1494 - DNA, 25 bp, Artificial Sequence
  Description of Artificial Sequence: Synthetic oligonucleotide
ttcctttatggtcattgatttttgt

SEQ ID NO: 1495 - DNA, 25 bp, Artificial Sequence
  Description of Artificial Sequence: Synthetic oligonucleotide
actgaaagaaacgtggtatactatg

SEQ ID NO: 1496 - DNA, 25 bp, Artificial Sequence
  Description of Artificial Sequence: Synthetic oligonucleotide
atcagactaggtgaatgtatttcca

SEQ ID NO: 1497 - DNA, 25 bp, Artificial Sequence
  Description of Artificial Sequence: Synthetic oligonucleotide
aaattttcctgcatctcaccttaaa

SEQ ID NO: 1498 - DNA, 25 bp, Artificial Sequence
  Description of Artificial Sequence: Synthetic oligonucleotide
gactaggtgaatgtatttccaagta

SEQ ID NO: 1499 - DNA, 25 bp, Artificial Sequence
  Description of Artificial Sequence: Synthetic oligonucleotide
aattttcctgcatctcaccttaaaa

SEQ ID NO: 1500 - DNA, 25 bp, Artificial Sequence
  Description of Artificial Sequence: Synthetic oligonucleotide
aaattgcatcgattttcaatactga

SEQ ID NO: 1501 - DNA, 25 bp, Artificial Sequence
  Description of Artificial Sequence: Synthetic oligonucleotide
ttttccacttgtataatcagcatat

SEQ ID NO: 1502 - DNA, 25 bp, Artificial Sequence
  Description of Artificial Sequence: Synthetic oligonucleotide
gtatactatggaatcagactaggtg

SEQ ID NO: 1503 - DNA, 25 bp, Artificial Sequence
  Description of Artificial Sequence: Synthetic oligonucleotide
ttccacttgtataatcagcatatat

SEQ ID NO: 1504 - DNA, 25 bp, Artificial Sequence
  Description of Artificial Sequence: Synthetic oligonucleotide
aacgtggtatactatggaatcagac

SEQ ID NO: 1505 - DNA, 25 bp, Artificial Sequence
  Description of Artificial Sequence: Synthetic oligonucleotide
tttttcaaaattgcatcgattttca

SEQ ID NO: 1506 - DNA, 25 bp, Artificial Sequence
  Description of Artificial Sequence: Synthetic oligonucleotide
ttcctgcatctcaccttaaaaaggt

SEQ ID NO: 1507 - DNA, 25 bp, Artificial Sequence
  Description of Artificial Sequence: Synthetic oligonucleotide
gaggtgagaggttattaacttctta

SEQ ID NO: 1508 - DNA, 25 bp, Artificial Sequence
  Description of Artificial Sequence: Synthetic oligonucleotide
atcagactaggtgaatgtatttcca

SEQ ID NO: 1509 - DNA, 25 bp, Artificial Sequence
  Description of Artificial Sequence: Synthetic oligonucleotide
aaattttcctgcatctcaccttaaa

SEQ ID NO: 1510 - DNA, 25 bp, Artificial Sequence
  Description of Artificial Sequence: Synthetic oligonucleotide
aaatcatattggatttttccacttg

SEQ ID NO: 1511 - DNA, 25 bp, Artificial Sequence
  Description of Artificial Sequence: Synthetic oligonucleotide
aaattgcatcgattttcaatactga

SEQ ID NO: 1512 - DNA, 25 bp, Artificial Sequence
  Description of Artificial Sequence: Synthetic oligonucleotide
gtatttccaagtaaattgcagcata

SEQ ID NO: 1513 - DNA, 25 bp, Artificial Sequence
  Description of Artificial Sequence: Synthetic oligonucleotide
ttttccacttgtataatcagcatat

SEQ ID NO: 1514 - DNA, 25 bp, Artificial Sequence
  Description of Artificial Sequence: Synthetic oligonucleotide
aacgtggtatactatggaatcagac

SEQ ID NO: 1515 - DNA, 25 bp, Artificial Sequence
  Description of Artificial Sequence: Synthetic oligonucleotide
cactgattaccccaaagggtaggaa

SEQ ID NO: 1516 - DNA, 25 bp, Artificial Sequence
  Description of Artificial Sequence: Synthetic oligonucleotide
aattgcagcatatttcattctttcc

SEQ ID NO: 1517 - DNA, 25 bp, Artificial Sequence
  Description of Artificial Sequence: Synthetic oligonucleotide
gcttcatgtttgtagaggaaccttg

SEQ ID NO: 1518 - DNA, 25 bp, Artificial Sequence
  Description of Artificial Sequence: Synthetic oligonucleotide
tgtgtgatacactaatgtatttgct

SEQ ID NO: 1519 - DNA, 25 bp, Artificial Sequence
  Description of Artificial Sequence: Synthetic oligonucleotide
ccccttgcttcatgtttgtagagga

SEQ ID NO: 1520 - DNA, 25 bp, Artificial Sequence
  Description of Artificial Sequence: Synthetic oligonucleotide
ttgtagaggaaccttgtgccggcca

SEQ ID NO: 1521 - DNA, 25 bp, Artificial Sequence
  Description of Artificial Sequence: Synthetic oligonucleotide
ctgtagcccaccttccccttgcttc

SEQ ID NO: 1522 - DNA, 25 bp, Artificial Sequence
  Description of Artificial Sequence: Synthetic oligonucleotide
ccttgcttcatgtttgtagaggaac

SEQ ID NO: 1523 - DNA, 25 bp, Artificial Sequence
  Description of Artificial Sequence: Synthetic oligonucleotide
ttccccttgcttcatgtttgtagag

SEQ ID NO: 1524 - DNA, 25 bp, Artificial Sequence
  Description of Artificial Sequence: Synthetic oligonucleotide
gctgctgtgagggatcttggagctt

SEQ ID NO: 1525 - DNA, 25 bp, Artificial Sequence
  Description of Artificial Sequence: Synthetic oligonucleotide
tgtagaggaaccttgtgccggccag

SEQ ID NO: 1526 - DNA, 25 bp, Artificial Sequence
  Description of Artificial Sequence: Synthetic oligonucleotide
gtttgtagaggaaccttgtgccggc

SEQ ID NO: 1527 - DNA, 25 bp, Artificial Sequence
  Description of Artificial Sequence: Synthetic oligonucleotide
catgtttgtagaggaaccttgtgcc

SEQ ID NO: 1528 - DNA, 25 bp, Artificial Sequence
  Description of Artificial Sequence: Synthetic oligonucleotide
aattctgtggcaaaaatggtgcctc

SEQ ID NO: 1529 - DNA, 25 bp, Artificial Sequence
  Description of Artificial Sequence: Synthetic oligonucleotide
tgtggcaaaaatggtgcctctgatg

SEQ ID NO: 1530 - DNA, 25 bp, Artificial Sequence
  Description of Artificial Sequence: Synthetic oligonucleotide
gttgtgatatagtattgtcagtgtg

SEQ ID NO: 1531 - DNA, 25 bp, Artificial Sequence
  Description of Artificial Sequence: Synthetic oligonucleotide
cttatgaaccataacaaatgtagct

SEQ ID NO: 1532 - DNA, 25 bp, Artificial Sequence
  Description of Artificial Sequence: Synthetic oligonucleotide
gatgttgtgatatagtattgtcagt

SEQ ID NO: 1533 - DNA, 25 bp, Artificial Sequence
  Description of Artificial Sequence: Synthetic oligonucleotide
tagtattgtcagtgtgtacatatat

SEQ ID NO: 1534 - DNA, 25 bp, Artificial Sequence
  Description of Artificial Sequence: Synthetic oligonucleotide
atgaaccataacaaatgtagctttt

SEQ ID NO: 1535 - DNA, 25 bp, Artificial Sequence
  Description of Artificial Sequence: Synthetic oligonucleotide
gtgatatagtattgtcagtgtgtac

SEQ ID NO: 1536 - DNA, 25 bp, Artificial Sequence
  Description of Artificial Sequence: Synthetic oligonucleotide
attacctaattctgtggcaaaaatg

SEQ ID NO: 1537 - DNA, 25 bp, Artificial Sequence
  Description of Artificial Sequence: Synthetic oligonucleotide
ctgtggcaaaaatggtgcctctgat

SEQ ID NO: 1538 - DNA, 25 bp, Artificial Sequence
  Description of Artificial Sequence: Synthetic oligonucleotide
aatatctaaatatgtctcacatatt

SEQ ID NO: 1539 - DNA, 25 bp, Artificial Sequence
  Description of Artificial Sequence: Synthetic oligonucleotide
aaaacctgtgtaaacctctgtcctt

SEQ ID NO: 1540 - DNA, 25 bp, Artificial Sequence
  Description of Artificial Sequence: Synthetic oligonucleotide
taatcctcaaatatactgtaccatt

SEQ ID NO: 1541 - DNA, 25 bp, Artificial Sequence
  Description of Artificial Sequence: Synthetic oligonucleotide
gcctctgatgttgtgatatagtatt

SEQ ID NO: 1542 - DNA, 25 bp, Artificial Sequence
  Description of Artificial Sequence: Synthetic oligonucleotide
aaatggtgcctctgatgttgtgata

SEQ ID NO: 1543 - DNA, 25 bp, Artificial Sequence
  Description of Artificial Sequence: Synthetic oligonucleotide
gtaaacctctgtccttatgaaccat

SEQ ID NO: 1544 - DNA, 25 bp, Artificial Sequence
  Description of Artificial Sequence: Synthetic oligonucleotide
ggagaagttttattcattacctaat

SEQ ID NO: 1545 - DNA, 25 bp, Artificial Sequence
  Description of Artificial Sequence: Synthetic oligonucleotide
gtgatatagtattgtcagtgtgtac

SEQ ID NO: 1546 - DNA, 25 bp, Artificial Sequence
  Description of Artificial Sequence: Synthetic oligonucleotide
atgaaccataacaaatgtagctttt

SEQ ID NO: 1547 - DNA, 25 bp, Artificial Sequence
  Description of Artificial Sequence: Synthetic oligonucleotide
attacctaattctgtggcaaaaatg

SEQ ID NO: 1548 - DNA, 25 bp, Artificial Sequence
  Description of Artificial Sequence: Synthetic oligonucleotide
ctgtggcaaaaatggtgcctctgat

SEQ ID NO: 1549 - DNA, 25 bp, Artificial Sequence
  Description of Artificial Sequence: Synthetic oligonucleotide
gctttttaaagtccattgtattgtt

SEQ ID NO: 1550 - DNA, 25 bp, Artificial Sequence
  Description of Artificial Sequence: Synthetic oligonucleotide
tatttactatagtgcagaagcaaca

SEQ ID NO: 1551 - DNA, 25 bp, Artificial Sequence
  Description of Artificial Sequence: Synthetic oligonucleotide
tatgttttatctagcaaatttgtaa

SEQ ID NO: 1552 - DNA, 25 bp, Artificial Sequence
  Description of Artificial Sequence: Synthetic oligonucleotide
gatatttactatagtgcagaagcaa

SEQ ID NO: 1553 - DNA, 25 bp, Artificial Sequence
  Description of Artificial Sequence: Synthetic oligonucleotide
actcttcactaggattccctatata

SEQ ID NO: 1554 - DNA, 25 bp, Artificial Sequence
  Description of Artificial Sequence: Synthetic oligonucleotide
tgctttctatggttattaaaagact

SEQ ID NO: 1555 - DNA, 25 bp, Artificial Sequence
  Description of Artificial Sequence: Synthetic oligonucleotide
tctagatatttactatagtgcagaa

SEQ ID NO: 1556 - DNA, 25 bp, Artificial Sequence
  Description of Artificial Sequence: Synthetic oligonucleotide
ctatactcttcactaggattcccta

SEQ ID NO: 1557 - DNA, 25 bp, Artificial Sequence
  Description of Artificial Sequence: Synthetic oligonucleotide
gctatactcttcactaggattccct

SEQ ID NO: 1558 - DNA, 25 bp, Artificial Sequence
  Description of Artificial Sequence: Synthetic oligonucleotide
cttcactaggattccctatatatat

SEQ ID NO: 1559 - DNA, 25 bp, Artificial Sequence
  Description of Artificial Sequence: Synthetic oligonucleotide
gattatgttttatctagcaaatttg

SEQ ID NO: 1560 - DNA, 25 bp, Artificial Sequence
  Description of Artificial Sequence: Synthetic oligonucleotide
gtgctttctatggttattaaaagac

SEQ ID NO: 1561 - DNA, 25 bp, Artificial Sequence
  Description of Artificial Sequence: Synthetic oligonucleotide
ccattttataagatttctctccata

SEQ ID NO: 1562 - DNA, 25 bp, Artificial Sequence
  Description of Artificial Sequence: Synthetic oligonucleotide
gatttctctccatatatatttctat

SEQ ID NO: 1563 - DNA, 25 bp, Artificial Sequence
  Description of Artificial Sequence: Synthetic oligonucleotide
gatatttactatagtgcagaagcaa

SEQ ID NO: 1564 - DNA, 25 bp, Artificial Sequence
  Description of Artificial Sequence: Synthetic oligonucleotide
aattacttttagtgctttctatggt

SEQ ID NO: 1565 - DNA, 25 bp, Artificial Sequence
  Description of Artificial Sequence: Synthetic oligonucleotide
tttcatttaactttccaggctttta

SEQ ID NO: 1566 - DNA, 25 bp, Artificial Sequence
  Description of Artificial Sequence: Synthetic oligonucleotide
atatgcctgttatagatatctagat

SEQ ID NO: 1567 - DNA, 25 bp, Artificial Sequence
  Description of Artificial Sequence: Synthetic oligonucleotide
tataactgctatactcttcactagg

SEQ ID NO: 1568 - DNA, 25 bp, Artificial Sequence
  Description of Artificial Sequence: Synthetic oligonucleotide
ctatactcttcactaggattcccta

SEQ ID NO: 1569 - DNA, 25 bp, Artificial Sequence
  Description of Artificial Sequence: Synthetic oligonucleotide
cttcactaggattccctatatatat

SEQ ID NO: 1570 - DNA, 25 bp, Artificial Sequence
  Description of Artificial Sequence: Synthetic oligonucleotide
gattatgttttatctagcaaatttg

SEQ ID NO: 1571 - DNA, 25 bp, Artificial Sequence
  Description of Artificial Sequence: Synthetic oligonucleotide
gtgctttctatggttattaaaagac

SEQ ID NO: 1572 - DNA, 25 bp, Artificial Sequence
  Description of Artificial Sequence: Synthetic oligonucleotide
tgatggagtgagacattgtggcctg

SEQ ID NO: 1573 - DNA, 25 bp, Artificial Sequence
  Description of Artificial Sequence: Synthetic oligonucleotide
ctgcatactaatcttttaaagcctt

SEQ ID NO: 1574 - DNA, 25 bp, Artificial Sequence
  Description of Artificial Sequence: Synthetic oligonucleotide
agtgagacattgtggcctggaagtc

SEQ ID NO: 1575 - DNA, 25 bp, Artificial Sequence
  Description of Artificial Sequence: Synthetic oligonucleotide
taaagcctttaacagttgcttttaa

SEQ ID NO: 1576 - DNA, 25 bp, Artificial Sequence
  Description of Artificial Sequence: Synthetic oligonucleotide
ttaaagcctttaacagttgctttta

SEQ ID NO: 1577 - DNA, 25 bp, Artificial Sequence
  Description of Artificial Sequence: Synthetic oligonucleotide
gtgagacattgtggcctggaagtct

SEQ ID NO: 1578 - DNA, 25 bp, Artificial Sequence
  Description of Artificial Sequence: Synthetic oligonucleotide
acgtaggtgagaacaaagtgatgga

SEQ ID NO: 1579 - DNA, 25 bp, Artificial Sequence
  Description of Artificial Sequence: Synthetic oligonucleotide
acaactgcatactaatcttttaaag

SEQ ID NO: 1580 - DNA, 25 bp, Artificial Sequence
  Description of Artificial Sequence: Synthetic oligonucleotide
gaaacgtaggtgagaacaaagtgat

SEQ ID NO: 1581 - DNA, 25 bp, Artificial Sequence
  Description of Artificial Sequence: Synthetic oligonucleotide
ctcctgaaacgtaggtgagaacaaa

SEQ ID NO: 1582 - DNA, 25 bp, Artificial Sequence
  Description of Artificial Sequence: Synthetic oligonucleotide
actgcatactaatcttttaaagcct

SEQ ID NO: 1583 - DNA, 25 bp, Artificial Sequence
  Description of Artificial Sequence: Synthetic oligonucleotide
tttacttgtaaacagcattagttgc

SEQ ID NO: 1584 - DNA, 25 bp, Artificial Sequence
  Description of Artificial Sequence: Synthetic oligonucleotide
gtaaacagcattagttgcagtcctg

SEQ ID NO: 1585 - DNA, 25 bp, Artificial Sequence
  Description of Artificial Sequence: Synthetic oligonucleotide
acagcattagttgcagtcctgaaat

SEQ ID NO: 1586 - DNA, 25 bp, Artificial Sequence
  Description of Artificial Sequence: Synthetic oligonucleotide
gcattagttgcagtcctgaaatttt

SEQ ID NO: 1587 - DNA, 25 bp, Artificial Sequence
  Description of Artificial Sequence: Synthetic oligonucleotide
atttcatgttaaatccacttatgtc

SEQ ID NO: 1588 - DNA, 25 bp, Artificial Sequence
  Description of Artificial Sequence: Synthetic oligonucleotide
catgttaaatccacttatgtcagaa

SEQ ID NO: 1589 - DNA, 25 bp, Artificial Sequence
  Description of Artificial Sequence: Synthetic oligonucleotide
gttaaatccacttatgtcagaatat

SEQ ID NO: 1590 - DNA, 25 bp, Artificial Sequence
  Description of Artificial Sequence: Synthetic oligonucleotide
attctgtataatatctgtctcttga

SEQ ID NO: 1591 - DNA, 25 bp, Artificial Sequence
  Description of Artificial Sequence: Synthetic oligonucleotide
ctgtataatatctgtctcttgaagt

SEQ ID NO: 1592 - DNA, 25 bp, Artificial Sequence
  Description of Artificial Sequence: Synthetic oligonucleotide
gtataatatctgtctcttgaagttt

SEQ ID NO: 1593 - DNA, 25 bp, Artificial Sequence
  Description of Artificial Sequence: Synthetic oligonucleotide
tacttgctttatggcataataaaga

SEQ ID NO: 1594 - DNA, 25 bp, Artificial Sequence
  Description of Artificial Sequence: Synthetic oligonucleotide
tttacttgtaaacagcattagttgc

SEQ ID NO: 1595 - DNA, 25 bp, Artificial Sequence
  Description of Artificial Sequence: Synthetic oligonucleotide
gtaaacagcattagttgcagtcctg

SEQ ID NO: 1596 - DNA, 25 bp, Artificial Sequence
  Description of Artificial Sequence: Synthetic oligonucleotide
acagcattagttgcagtcctgaaat

SEQ ID NO: 1597 - DNA, 25 bp, Artificial Sequence
  Description of Artificial Sequence: Synthetic oligonucleotide
gttgcagtcctgaaattttaatatt

SEQ ID NO: 1598 - DNA, 25 bp, Artificial Sequence
  Description of Artificial Sequence: Synthetic oligonucleotide
attgctgaattcctaacatttctag

SEQ ID NO: 1599 - DNA, 25 bp, Artificial Sequence
  Description of Artificial Sequence: Synthetic oligonucleotide
atttcatgttaaatccacttatgtc

SEQ ID NO: 1600 - DNA, 25 bp, Artificial Sequence
  Description of Artificial Sequence: Synthetic oligonucleotide
gttaaatccacttatgtcagaatat

SEQ ID NO: 1601 - DNA, 25 bp, Artificial Sequence
  Description of Artificial Sequence: Synthetic oligonucleotide
attctgtataatatctgtctcttga

SEQ ID NO: 1602 - DNA, 25 bp, Artificial Sequence
  Description of Artificial Sequence: Synthetic oligonucleotide
gtataatatctgtctcttgaagttt

SEQ ID NO: 1603 - DNA, 25 bp, Artificial Sequence
  Description of Artificial Sequence: Synthetic oligonucleotide
ctgtctcttgaagtttgatgatact

SEQ ID NO: 1604 - DNA, 25 bp, Artificial Sequence
  Description of Artificial Sequence: Synthetic oligonucleotide
gtttgatgatacttgctttatggca

SEQ ID NO: 1605 - DNA, 25 bp, Artificial Sequence
  Description of Artificial Sequence: Synthetic oligonucleotide
gcagggtcctgagtaaatgtgttct

SEQ ID NO: 1606 - DNA, 25 bp, Artificial Sequence
  Description of Artificial Sequence: Synthetic oligonucleotide
tcctgagtaaatgtgttctgtataa

SEQ ID NO: 1607 - DNA, 25 bp, Artificial Sequence
  Description of Artificial Sequence: Synthetic oligonucleotide
tacccaaagaacgaagctgacactg

SEQ ID NO: 1608 - DNA, 25 bp, Artificial Sequence
  Description of Artificial Sequence: Synthetic oligonucleotide
gggtcctgagtaaatgtgttctgta

SEQ ID NO: 1609 - DNA, 25 bp, Artificial Sequence
  Description of Artificial Sequence: Synthetic oligonucleotide
ggctgcatacccaaagaacgaagct

SEQ ID NO: 1610 - DNA, 25 bp, Artificial Sequence
  Description of Artificial Sequence: Synthetic oligonucleotide
caaatgcagctggaatcgctcaaga

SEQ ID NO: 1611 - DNA, 25 bp, Artificial Sequence
  Description of Artificial Sequence: Synthetic oligonucleotide
aatgcagctggaatcgctcaagaat

SEQ ID NO: 1612 - DNA, 25 bp, Artificial Sequence
  Description of Artificial Sequence: Synthetic oligonucleotide
tgcatacccaaagaacgaagctgac

SEQ ID NO: 1613 - DNA, 25 bp, Artificial Sequence
  Description of Artificial Sequence: Synthetic oligonucleotide
atccagatagaaggctgcataccca

SEQ ID NO: 1614 - DNA, 25 bp, Artificial Sequence
  Description of Artificial Sequence: Synthetic oligonucleotide
tgttgtaaaccaatgaacatttgct

SEQ ID NO: 1615 - DNA, 25 bp, Artificial Sequence
  Description of Artificial Sequence: Synthetic oligonucleotide
cccaaagaacgaagctgacactgca

SEQ ID NO: 1616 - DNA, 25 bp, Artificial Sequence
  Description of Artificial Sequence: Synthetic oligonucleotide
gcagggtcctgagtaaatgtgttct

SEQ ID NO: 1617 - DNA, 25 bp, Artificial Sequence
  Description of Artificial Sequence: Synthetic oligonucleotide
tcctgagtaaatgtgttctgtataa

SEQ ID NO: 1618 - DNA, 25 bp, Artificial Sequence
  Description of Artificial Sequence: Synthetic oligonucleotide
agatattctggctggcctgcagaga

SEQ ID NO: 1619 - DNA, 25 bp, Artificial Sequence
  Description of Artificial Sequence: Synthetic oligonucleotide
tacccaaagaacgaagctgacactg

SEQ ID NO: 1620 - DNA, 25 bp, Artificial Sequence
  Description of Artificial Sequence: Synthetic oligonucleotide
ggctgcatacccaaagaacgaagct

SEQ ID NO: 1621 - DNA, 25 bp, Artificial Sequence
  Description of Artificial Sequence: Synthetic oligonucleotide
caaatgcagctggaatcgctcaaga

SEQ ID NO: 1622 - DNA, 25 bp, Artificial Sequence
  Description of Artificial Sequence: Synthetic oligonucleotide
aatgcagctggaatcgctcaagaat

SEQ ID NO: 1623 - DNA, 25 bp, Artificial Sequence
  Description of Artificial Sequence: Synthetic oligonucleotide
aacagatattctggctggcctgcag

SEQ ID NO: 1624 - DNA, 25 bp, Artificial Sequence
  Description of Artificial Sequence: Synthetic oligonucleotide
atccagatagaaggctgcataccca

SEQ ID NO: 1625 - DNA, 25 bp, Artificial Sequence
  Description of Artificial Sequence: Synthetic oligonucleotide
tgttgtaaaccaatgaacatttgct

SEQ ID NO: 1626 - DNA, 25 bp, Artificial Sequence
  Description of Artificial Sequence: Synthetic oligonucleotide
aacaacagatattctggctggcctg

SEQ ID NO: 1627 - DNA, 25 bp, Artificial Sequence
  Description of Artificial Sequence: Synthetic oligonucleotide
atggatactgaatactcaggcccac

SEQ ID NO: 1628 - DNA, 25 bp, Artificial Sequence
  Description of Artificial Sequence: Synthetic oligonucleotide
gctatgtacagagaaatgtgataat

SEQ ID NO: 1629 - DNA, 25 bp, Artificial Sequence
  Description of Artificial Sequence: Synthetic oligonucleotide
tagtagatggatactgaatactcag

SEQ ID NO: 1630 - DNA, 25 bp, Artificial Sequence
  Description of Artificial Sequence: Synthetic oligonucleotide
gtttttgtctttatgctatgtacag

SEQ ID NO: 1631 - DNA, 25 bp, Artificial Sequence
  Description of Artificial Sequence: Synthetic oligonucleotide
atctcaattacaccaactgtgcaaa

SEQ ID NO: 1632 - DNA, 25 bp, Artificial Sequence
  Description of Artificial Sequence: Synthetic oligonucleotide
gaaatgttagtatctcaattacacc

SEQ ID NO: 1633 - DNA, 25 bp, Artificial Sequence
  Description of Artificial Sequence: Synthetic oligonucleotide
agtatctcaattacaccaactgtgc

SEQ ID NO: 1634 - DNA, 25 bp, Artificial Sequence
  Description of Artificial Sequence: Synthetic oligonucleotide
tactcaggcccacttaaattattaa

SEQ ID NO: 1635 - DNA, 25 bp, Artificial Sequence
  Description of Artificial Sequence: Synthetic oligonucleotide
gttagtatctcaattacaccaactg

SEQ ID NO: 1636 - DNA, 25 bp, Artificial Sequence
  Description of Artificial Sequence: Synthetic oligonucleotide
atactcaggcccacttaaattatta

SEQ ID NO: 1637 - DNA, 25 bp, Artificial Sequence
  Description of Artificial Sequence: Synthetic oligonucleotide
gtctttatgctatgtacagagaaat

SEQ ID NO: 1638 - DNA, 25 bp, Artificial Sequence
  Description of Artificial Sequence: Synthetic oligonucleotide
cgctgattactcttagagaagaaga

SEQ ID NO: 1639 - DNA, 25 bp, Artificial Sequence
  Description of Artificial Sequence: Synthetic oligonucleotide
agaccagttgcgctgattactctta

SEQ ID NO: 1640 - DNA, 25 bp, Artificial Sequence
  Description of Artificial Sequence: Synthetic oligonucleotide
gcgctgattactcttagagaagaag

SEQ ID NO: 1641 - DNA, 25 bp, Artificial Sequence
  Description of Artificial Sequence: Synthetic oligonucleotide
ataatttgaaggttggcagaccagt

SEQ ID NO: 1642 - DNA, 25 bp, Artificial Sequence
  Description of Artificial Sequence: Synthetic oligonucleotide
gttgcgctgattactcttagagaag

SEQ ID NO: 1643 - DNA, 25 bp, Artificial Sequence
  Description of Artificial Sequence: Synthetic oligonucleotide
aatttgaaggttggcagaccagttg

SEQ ID NO: 1644 - DNA, 25 bp, Artificial Sequence
  Description of Artificial Sequence: Synthetic oligonucleotide
ttggcagaccagttgcgctgattac

SEQ ID NO: 1645 - DNA, 25 bp, Artificial Sequence
  Description of Artificial Sequence: Synthetic oligonucleotide
ggcagaccagttgcgctgattactc

SEQ ID NO: 1646 - DNA, 25 bp, Artificial Sequence
  Description of Artificial Sequence: Synthetic oligonucleotide
ttgaaggttggcagaccagttgcgc

SEQ ID NO: 1647 - DNA, 25 bp, Artificial Sequence
  Description of Artificial Sequence: Synthetic oligonucleotide
aaggttggcagaccagttgcgctga

SEQ ID NO: 1648 - DNA, 25 bp, Artificial Sequence
  Description of Artificial Sequence: Synthetic oligonucleotide
ccagttgcgctgattactcttagag

SEQ ID NO: 1649 - DNA, 25 bp, Artificial Sequence
  Description of Artificial Sequence: Synthetic oligonucleotide
gttccaattttgttgctgaattgct

SEQ ID NO: 1650 - DNA, 25 bp, Artificial Sequence
  Description of Artificial Sequence: Synthetic oligonucleotide
gtatttatcccagctttttaaatgg

SEQ ID NO: 1651 - DNA, 25 bp, Artificial Sequence
  Description of Artificial Sequence: Synthetic oligonucleotide
actaagttccaattttgttgctgaa

SEQ ID NO: 1652 - DNA, 25 bp, Artificial Sequence
  Description of Artificial Sequence: Synthetic oligonucleotide
aatatttgctacatatttcacaggg

SEQ ID NO: 1653 - DNA, 25 bp, Artificial Sequence
  Description of Artificial Sequence: Synthetic oligonucleotide
ttcatgagcccctctttggcaggaa

SEQ ID NO: 1654 - DNA, 25 bp, Artificial Sequence
  Description of Artificial Sequence: Synthetic oligonucleotide
gcaggaactctgtttaattctttgt

SEQ ID NO: 1655 - DNA, 25 bp, Artificial Sequence
  Description of Artificial Sequence: Synthetic oligonucleotide
aaatttttcatgagcccctctttgg

SEQ ID NO: 1656 - DNA, 25 bp, Artificial Sequence
  Description of Artificial Sequence: Synthetic oligonucleotide
agctttttaaatggtggctgtaaca

SEQ ID NO: 1657 - DNA, 25 bp, Artificial Sequence
  Description of Artificial Sequence: Synthetic oligonucleotide
tcacttttcagttttaaggaagaat

SEQ ID NO: 1658 - DNA, 25 bp, Artificial Sequence
  Description of Artificial Sequence: Synthetic oligonucleotide
gtgagttcacttttcagttttaagg

SEQ ID NO: 1659 - DNA, 25 bp, Artificial Sequence
  Description of Artificial Sequence: Synthetic oligonucleotide
tctgtgagttcacttttcagtttta

SEQ ID NO: 1660 - DNA, 25 bp, Artificial Sequence
  Description of Artificial Sequence: Synthetic oligonucleotide
gaatgactagcccaattatccttat

SEQ ID NO: 1661 - DNA, 25 bp, Artificial Sequence
  Description of Artificial Sequence: Synthetic oligonucleotide
atatcatactactctgcctttgtgg

SEQ ID NO: 1662 - DNA, 25 bp, Artificial Sequence
  Description of Artificial Sequence: Synthetic oligonucleotide
ttgttaatgaatgactagcccaatt

SEQ ID NO: 1663 - DNA, 25 bp, Artificial Sequence
  Description of Artificial Sequence: Synthetic oligonucleotide
catttggatactttgaaagatgaca

SEQ ID NO: 1664 - DNA, 25 bp, Artificial Sequence
  Description of Artificial Sequence: Synthetic oligonucleotide
gggcacatatgtagacactactaaa

SEQ ID NO: 1665 - DNA, 25 bp, Artificial Sequence
  Description of Artificial Sequence: Synthetic oligonucleotide
tgactagcccaattatccttataaa

SEQ ID NO: 1666 - DNA, 25 bp, Artificial Sequence
  Description of Artificial Sequence: Synthetic oligonucleotide
gtgggcacatatgtagacactacta

SEQ ID NO: 1667 - DNA, 25 bp, Artificial Sequence
  Description of Artificial Sequence: Synthetic oligonucleotide
tttaaaattccatacacgtttgcag

SEQ ID NO: 1668 - DNA, 25 bp, Artificial Sequence
  Description of Artificial Sequence: Synthetic oligonucleotide
aatatggttagttccagagtgcaaa

SEQ ID NO: 1669 - DNA, 25 bp, Artificial Sequence
  Description of Artificial Sequence: Synthetic oligonucleotide
gctttgatatcatactactctgcct

SEQ ID NO: 1670 - DNA, 25 bp, Artificial Sequence
  Description of Artificial Sequence: Synthetic oligonucleotide
ttgatatcatactactctgcctttg

SEQ ID NO: 1671 - DNA, 25 bp, Artificial Sequence
  Description of Artificial Sequence: Synthetic oligonucleotide
gtaaaagtggcagagtccgttgaac

SEQ ID NO: 1672 - DNA, 25 bp, Artificial Sequence
  Description of Artificial Sequence: Synthetic oligonucleotide
ggtatccagcagctacaggacttaa

SEQ ID NO: 1673 - DNA, 25 bp, Artificial Sequence
  Description of Artificial Sequence: Synthetic oligonucleotide
gtatccagcagctacaggacttaat

SEQ ID NO: 1674 - DNA, 25 bp, Artificial Sequence
  Description of Artificial Sequence: Synthetic oligonucleotide
atgctttaacagttggtatccagca

SEQ ID NO: 1675 - DNA, 25 bp, Artificial Sequence
  Description of Artificial Sequence: Synthetic oligonucleotide
cagagtccgttgaacttgaattcag

SEQ ID NO: 1676 - DNA, 25 bp, Artificial Sequence
  Description of Artificial Sequence: Synthetic oligonucleotide
tgacatatggtatttcatttaaacc

SEQ ID NO: 1677 - DNA, 25 bp, Artificial Sequence
  Description of Artificial Sequence: Synthetic oligonucleotide
gtggcagagtccgttgaacttgaat

SEQ ID NO: 1678 - DNA, 25 bp, Artificial Sequence
  Description of Artificial Sequence: Synthetic oligonucleotide
agtaaaagtggcagagtccgttgaa

SEQ ID NO: 1679 - DNA, 25 bp, Artificial Sequence
  Description of Artificial Sequence: Synthetic oligonucleotide
aaagtggcagagtccgttgaacttg

SEQ ID NO: 1680 - DNA, 25 bp, Artificial Sequence
  Description of Artificial Sequence: Synthetic oligonucleotide
gcagagtccgttgaacttgaattca

SEQ ID NO: 1681 - DNA, 25 bp, Artificial Sequence
  Description of Artificial Sequence: Synthetic oligonucleotide
gtttgacatatggtatttcatttaa

SEQ ID NO: 1682 - DNA, 25 bp, Artificial Sequence
  Description of Artificial Sequence: Synthetic oligonucleotide
aaactcacagaagggcctatggtta

SEQ ID NO: 1683 - DNA, 25 bp, Artificial Sequence
  Description of Artificial Sequence: Synthetic oligonucleotide
gtgatcctttgaagagtgtcctcca

SEQ ID NO: 1684 - DNA, 25 bp, Artificial Sequence
  Description of Artificial Sequence: Synthetic oligonucleotide
ggtatttcatttaaaccttctgtga

SEQ ID NO: 1685 - DNA, 25 bp, Artificial Sequence
  Description of Artificial Sequence: Synthetic oligonucleotide
atttaaaccttctgtgatcctttga

SEQ ID NO: 1686 - DNA, 25 bp, Artificial Sequence
  Description of Artificial Sequence: Synthetic oligonucleotide
ggtatccagcagctacaggacttaa

SEQ ID NO: 1687 - DNA, 25 bp, Artificial Sequence
  Description of Artificial Sequence: Synthetic oligonucleotide
taaagctcactttgtaaaattgcaa

SEQ ID NO: 1688 - DNA, 25 bp, Artificial Sequence
  Description of Artificial Sequence: Synthetic oligonucleotide
atgctttaacagttggtatccagca

SEQ ID NO: 1689 - DNA, 25 bp, Artificial Sequence
  Description of Artificial Sequence: Synthetic oligonucleotide
gtggcagagtccgttgaacttgaat

SEQ ID NO: 1690 - DNA, 25 bp, Artificial Sequence
  Description of Artificial Sequence: Synthetic oligonucleotide
atgtgctatgtactaagtgtttgac

SEQ ID NO: 1691 - DNA, 25 bp, Artificial Sequence
  Description of Artificial Sequence: Synthetic oligonucleotide
gtaaaagtggcagagtccgttgaac

SEQ ID NO: 1692 - DNA, 25 bp, Artificial Sequence
  Description of Artificial Sequence: Synthetic oligonucleotide
aagagtgtcctccaatttttcccat

SEQ ID NO: 1693 - DNA, 25 bp, Artificial Sequence
  Description of Artificial Sequence: Synthetic oligonucleotide
aatatgagattccagctgtatcacc

SEQ ID NO: 1694 - DNA, 25 bp, Artificial Sequence
  Description of Artificial Sequence: Synthetic oligonucleotide
acacattcaccatcagttacatgct

SEQ ID NO: 1695 - DNA, 25 bp, Artificial Sequence
  Description of Artificial Sequence: Synthetic oligonucleotide
atcagttacatgctggcagaagtca

SEQ ID NO: 1696 - DNA, 25 bp, Artificial Sequence
  Description of Artificial Sequence: Synthetic oligonucleotide
gacacctaggatacaatttaggcat

SEQ ID NO: 1697 - DNA, 25 bp, Artificial Sequence
  Description of Artificial Sequence: Synthetic oligonucleotide
ctgatcttgtgagtagaacaacagt

SEQ ID NO: 1698 - DNA, 25 bp, Artificial Sequence
  Description of Artificial Sequence: Synthetic oligonucleotide
tcatggtggagtagacacctaggat

SEQ ID NO: 1699 - DNA, 25 bp, Artificial Sequence
  Description of Artificial Sequence: Synthetic oligonucleotide
accaatgatatcacccattgaaact

SEQ ID NO: 1700 - DNA, 25 bp, Artificial Sequence
  Description of Artificial Sequence: Synthetic oligonucleotide
gtatcaccaatgatatcacccattg

SEQ ID NO: 1701 - DNA, 25 bp, Artificial Sequence
  Description of Artificial Sequence: Synthetic oligonucleotide
gagattccagctgtatcaccaatga

SEQ ID NO: 1702 - DNA, 25 bp, Artificial Sequence
  Description of Artificial Sequence: Synthetic oligonucleotide
attcaccatcagttacatgctggca

SEQ ID NO: 1703 - DNA, 25 bp, Artificial Sequence
  Description of Artificial Sequence: Synthetic oligonucleotide
tacatgctggcagaagtcaaccctg

SEQ ID NO: 1704 - DNA, 25 bp, Artificial Sequence
  Description of Artificial Sequence: Synthetic oligonucleotide
tcagccatgtacaggatccacaggg

SEQ ID NO: 1705 - DNA, 25 bp, Artificial Sequence
  Description of Artificial Sequence: Synthetic oligonucleotide
gtcagccatgtacaggatccacagg

SEQ ID NO: 1706 - DNA, 25 bp, Artificial Sequence
  Description of Artificial Sequence: Synthetic oligonucleotide
cgtcagccatgtacaggatccacag

SEQ ID NO: 1707 - DNA, 25 bp, Artificial Sequence
  Description of Artificial Sequence: Synthetic oligonucleotide
gccatgtacaggatccacaggggtg

SEQ ID NO: 1708 - DNA, 25 bp, Artificial Sequence
  Description of Artificial Sequence: Synthetic oligonucleotide
aggatccacaggggtggtgtcaaat

SEQ ID NO: 1709 - DNA, 25 bp, Artificial Sequence
  Description of Artificial Sequence: Synthetic oligonucleotide
tgacgtcagccatgtacaggatcca

SEQ ID NO: 1710 - DNA, 25 bp, Artificial Sequence
  Description of Artificial Sequence: Synthetic oligonucleotide
catgtacaggatccacaggggtggt

SEQ ID NO: 1711 - DNA, 25 bp, Artificial Sequence
  Description of Artificial Sequence: Synthetic oligonucleotide
caggatccacaggggtggtgtcaaa

SEQ ID NO: 1712 - DNA, 25 bp, Artificial Sequence
  Description of Artificial Sequence: Synthetic oligonucleotide
acaggatccacaggggtggtgtcaa

SEQ ID NO: 1713 - DNA, 25 bp, Artificial Sequence
  Description of Artificial Sequence: Synthetic oligonucleotide
gacgtcagccatgtacaggatccac

SEQ ID NO: 1714 - DNA, 25 bp, Artificial Sequence
  Description of Artificial Sequence: Synthetic oligonucleotide
acgtcagccatgtacaggatccaca

SEQ ID NO: 1715 - DNA, 25 bp, Artificial Sequence
  Description of Artificial Sequence: Synthetic oligonucleotide
ttcagccatgtatcaatattcactt

SEQ ID NO: 1716 - DNA, 25 bp, Artificial Sequence
  Description of Artificial Sequence: Synthetic oligonucleotide
gatgttatcgcttatgttaatagta

SEQ ID NO: 1717 - DNA, 25 bp, Artificial Sequence
  Description of Artificial Sequence: Synthetic oligonucleotide
accagatgttttgatgttatcgctt

SEQ ID NO: 1718 - DNA, 25 bp, Artificial Sequence
  Description of Artificial Sequence: Synthetic oligonucleotide
atattcacttgactaaaatcactca

SEQ ID NO: 1719 - DNA, 25 bp, Artificial Sequence
  Description of Artificial Sequence: Synthetic oligonucleotide
tttttcagccatgtatcaatattca

SEQ ID NO: 1720 - DNA, 25 bp, Artificial Sequence
  Description of Artificial Sequence: Synthetic oligonucleotide
tcctcttttagatcctaagtctctt

SEQ ID NO: 1721 - DNA, 25 bp, Artificial Sequence
  Description of Artificial Sequence: Synthetic oligonucleotide
gtctcttacaaaagctttgaatact

SEQ ID NO: 1722 - DNA, 25 bp, Artificial Sequence
  Description of Artificial Sequence: Synthetic oligonucleotide
gtagtactcctcttttagatcctaa

SEQ ID NO: 1723 - DNA, 25 bp, Artificial Sequence
  Description of Artificial Sequence: Synthetic oligonucleotide
gcttatgttaatagtaattcccgta

SEQ ID NO: 1724 - DNA, 25 bp, Artificial Sequence
  Description of Artificial Sequence: Synthetic oligonucleotide
tttagatcctaagtctcttacaaaa

SEQ ID NO: 1725 - DNA, 25 bp, Artificial Sequence
  Description of Artificial Sequence: Synthetic oligonucleotide
ttcctgtagtactcctcttttagat

SEQ ID NO: 1726 - DNA, 25 bp, Artificial Sequence
  Description of Artificial Sequence: Synthetic oligonucleotide
tcaccacatcccattgtgtggatag

SEQ ID NO: 1727 - DNA, 25 bp, Artificial Sequence
  Description of Artificial Sequence: Synthetic oligonucleotide
ttaagcctctttattatagttcccc

SEQ ID NO: 1728 - DNA, 25 bp, Artificial Sequence
  Description of Artificial Sequence: Synthetic oligonucleotide
ctttattatagttccccctacattt

SEQ ID NO: 1729 - DNA, 25 bp, Artificial Sequence
  Description of Artificial Sequence: Synthetic oligonucleotide
gtggatagactatcatttataaagc

SEQ ID NO: 1730 - DNA, 25 bp, Artificial Sequence
  Description of Artificial Sequence: Synthetic oligonucleotide
ttaaatcaccacatcccattgtgtg

SEQ ID NO: 1731 - DNA, 25 bp, Artificial Sequence
  Description of Artificial Sequence: Synthetic oligonucleotide
cctttgtcttctggataccgtttta

SEQ ID NO: 1732 - DNA, 25 bp, Artificial Sequence
  Description of Artificial Sequence: Synthetic oligonucleotide
ataaatggctaaatttctttctatg

SEQ ID NO: 1733 - DNA, 25 bp, Artificial Sequence
  Description of Artificial Sequence: Synthetic oligonucleotide
ggataccgttttacaaacatacttg

SEQ ID NO: 1734 - DNA, 25 bp, Artificial Sequence
  Description of Artificial Sequence: Synthetic oligonucleotide
cacatgccactgttatgttgaagaa

SEQ ID NO: 1735 - DNA, 25 bp, Artificial Sequence
  Description of Artificial Sequence: Synthetic oligonucleotide
tgtcttctggataccgttttacaaa

SEQ ID NO: 1736 - DNA, 25 bp, Artificial Sequence
  Description of Artificial Sequence: Synthetic oligonucleotide
tttggttcacatgccactgttatgt

SEQ ID NO: 1737 - DNA, 25 bp, Artificial Sequence
  Description of Artificial Sequence: Synthetic oligonucleotide
taggtgacaccgaaagacccttcct

SEQ ID NO: 1738 - DNA, 25 bp, Artificial Sequence
  Description of Artificial Sequence: Synthetic oligonucleotide
aacacagagagaccttgttctacaa

SEQ ID NO: 1739 - DNA, 25 bp, Artificial Sequence
  Description of Artificial Sequence: Synthetic oligonucleotide
tgtcatcccaccaccttgggaagca

SEQ ID NO: 1740 - DNA, 25 bp, Artificial Sequence
  Description of Artificial Sequence: Synthetic oligonucleotide
aggtgacaccgaaagacccttcctc

SEQ ID NO: 1741 - DNA, 25 bp, Artificial Sequence
  Description of Artificial Sequence: Synthetic oligonucleotide
tggtgtggtgtcaagcacctctagt

SEQ ID NO: 1742 - DNA, 25 bp, Artificial Sequence
  Description of Artificial Sequence: Synthetic oligonucleotide
gagaaatgacaaaaccagccaggtg

SEQ ID NO: 1743 - DNA, 25 bp, Artificial Sequence
  Description of Artificial Sequence: Synthetic oligonucleotide
agcctggtgtggtgtcaagcacctc

SEQ ID NO: 1744 - DNA, 25 bp, Artificial Sequence
  Description of Artificial Sequence: Synthetic oligonucleotide
ctacactacagcctaggtgacaccg

SEQ ID NO: 1745 - DNA, 25 bp, Artificial Sequence
  Description of Artificial Sequence: Synthetic oligonucleotide
cactacagcctaggtgacaccgaaa

SEQ ID NO: 1746 - DNA, 25 bp, Artificial Sequence
  Description of Artificial Sequence: Synthetic oligonucleotide
ccaatgtggccaacacagagagacc

SEQ ID NO: 1747 - DNA, 25 bp, Artificial Sequence
  Description of Artificial Sequence: Synthetic oligonucleotide
acagagagaccttgttctacaaaaa

SEQ ID NO: 1748 - DNA, 25 bp, Artificial Sequence
  Description of Artificial Sequence: Synthetic oligonucleotide
aagagactacagagtcaaagctcat

SEQ ID NO: 1749 - DNA, 25 bp, Artificial Sequence
  Description of Artificial Sequence: Synthetic oligonucleotide
gactacagagtcaaagctcattttt

SEQ ID NO: 1750 - DNA, 25 bp, Artificial Sequence
  Description of Artificial Sequence: Synthetic oligonucleotide
tttccatttatatcagggattctat

SEQ ID NO: 1751 - DNA, 25 bp, Artificial Sequence
  Description of Artificial Sequence: Synthetic oligonucleotide
gggattctatttacttgaagactgt

SEQ ID NO: 1752 - DNA, 25 bp, Artificial Sequence
  Description of Artificial Sequence: Synthetic oligonucleotide
acttgaagactgtgaagttgccatt

SEQ ID NO: 1753 - DNA, 25 bp, Artificial Sequence
  Description of Artificial Sequence: Synthetic oligonucleotide
gttttctttgacataactaggatcc

SEQ ID NO: 1754 - DNA, 25 bp, Artificial Sequence
  Description of Artificial Sequence: Synthetic oligonucleotide
tctttgacataactaggatccatta

SEQ ID NO: 1755 - DNA, 25 bp, Artificial Sequence
  Description of Artificial Sequence: Synthetic oligonucleotide
ataactaggatccattatttcccct

SEQ ID NO: 1756 - DNA, 25 bp, Artificial Sequence
  Description of Artificial Sequence: Synthetic oligonucleotide
gttagaaaatagtacagttacaacc

SEQ ID NO: 1757 - DNA, 25 bp, Artificial Sequence
  Description of Artificial Sequence: Synthetic oligonucleotide
cattgtagtagggagtgtgtacccc

SEQ ID NO: 1758 - DNA, 25 bp, Artificial Sequence
  Description of Artificial Sequence: Synthetic oligonucleotide
agtagggagtgtgtaccccttactc

SEQ ID NO: 1759 - DNA, 25 bp, Artificial Sequence
  Description of Artificial Sequence: Synthetic oligonucleotide
tgtaagctactcagtgtatgaaact

SEQ ID NO: 1760 - DNA, 25 bp, Artificial Sequence
  Description of Artificial Sequence: Synthetic oligonucleotide
tgttgtgtaagctactcagtgtatg

SEQ ID NO: 1761 - DNA, 25 bp, Artificial Sequence
  Description of Artificial Sequence: Synthetic oligonucleotide
cccggtttccaaacgagtgagaaat

SEQ ID NO: 1762 - DNA, 25 bp, Artificial Sequence
  Description of Artificial Sequence: Synthetic oligonucleotide
tggcagccagagcagattaatgcat

SEQ ID NO: 1763 - DNA, 25 bp, Artificial Sequence
  Description of Artificial Sequence: Synthetic oligonucleotide
gagccctcctctacaccatgtgagg

SEQ ID NO: 1764 - DNA, 25 bp, Artificial Sequence
  Description of Artificial Sequence: Synthetic oligonucleotide
gcagccagagcagattaatgcatgc

SEQ ID NO: 1765 - DNA, 25 bp, Artificial Sequence
  Description of Artificial Sequence: Synthetic oligonucleotide
aaccttgtcatatcccttcccggtt

SEQ ID NO: 1766 - DNA, 25 bp, Artificial Sequence
  Description of Artificial Sequence: Synthetic oligonucleotide
gaagagagtctgagccctcctctac

SEQ ID NO: 1767 - DNA, 25 bp, Artificial Sequence
  Description of Artificial Sequence: Synthetic oligonucleotide
tcgccagaaccttgtcatatccctt

SEQ ID NO: 1768 - DNA, 25 bp, Artificial Sequence
  Description of Artificial Sequence: Synthetic oligonucleotide
tacctcgccagaaccttgtcatatc

SEQ ID NO: 1769 - DNA, 25 bp, Artificial Sequence
  Description of Artificial Sequence: Synthetic oligonucleotide
cttcccggtttccaaacgagtgaga

SEQ ID NO: 1770 - DNA, 25 bp, Artificial Sequence
  Description of Artificial Sequence: Synthetic oligonucleotide
tgtaagctactcagtgtatgaaact

SEQ ID NO: 1771 - DNA, 25 bp, Artificial Sequence
  Description of Artificial Sequence: Synthetic oligonucleotide
tgttgtgtaagctactcagtgtatg

SEQ ID NO: 1772 - DNA, 25 bp, Artificial Sequence
  Description of Artificial Sequence: Synthetic oligonucleotide
gcacagagagagagcagccatcaac

SEQ ID NO: 1773 - DNA, 25 bp, Artificial Sequence
  Description of Artificial Sequence: Synthetic oligonucleotide
aatgcatgcttcttggactttgttt

SEQ ID NO: 1774 - DNA, 25 bp, Artificial Sequence
  Description of Artificial Sequence: Synthetic oligonucleotide
tggcagccagagcagattaatgcat

SEQ ID NO: 1775 - DNA, 25 bp, Artificial Sequence
  Description of Artificial Sequence: Synthetic oligonucleotide
gagccctcctctacaccatgtgagg

SEQ ID NO: 1776 - DNA, 25 bp, Artificial Sequence
  Description of Artificial Sequence: Synthetic oligonucleotide
aaccttgtcatatcccttcccggtt

SEQ ID NO: 1777 - DNA, 25 bp, Artificial Sequence
  Description of Artificial Sequence: Synthetic oligonucleotide
gaagagagtctgagccctcctctac

SEQ ID NO: 1778 - DNA, 25 bp, Artificial Sequence
  Description of Artificial Sequence: Synthetic oligonucleotide
tacctcgccagaaccttgtcatatc

SEQ ID NO: 1779 - DNA, 25 bp, Artificial Sequence
  Description of Artificial Sequence: Synthetic oligonucleotide
cttcccggtttccaaacgagtgaga

SEQ ID NO: 1780 - DNA, 25 bp, Artificial Sequence
  Description of Artificial Sequence: Synthetic oligonucleotide
tgagaatgaaacctacctcgccaga

SEQ ID NO: 1781 - DNA, 25 bp, Artificial Sequence
  Description of Artificial Sequence: Synthetic oligonucleotide
accctcagtggagaaccactggctc

SEQ ID NO: 1782 - DNA, 25 bp, Artificial Sequence
  Description of Artificial Sequence: Synthetic oligonucleotide
ggagagtgtgcgctaccttgccaag

SEQ ID NO: 1783 - DNA, 25 bp, Artificial Sequence
  Description of Artificial Sequence: Synthetic oligonucleotide
aacattgtcaaatggaccctggcgg

SEQ ID NO: 1784 - DNA, 25 bp, Artificial Sequence
  Description of Artificial Sequence: Synthetic oligonucleotide
tgcaccataggacccttagcagcag

SEQ ID NO: 1785 - DNA, 25 bp, Artificial Sequence
  Description of Artificial Sequence: Synthetic oligonucleotide
gcggcaaaatcaccctcagtggaga

SEQ ID NO: 1786 - DNA, 25 bp, Artificial Sequence
  Description of Artificial Sequence: Synthetic oligonucleotide
tgttcaaatgattaaccatccccat

SEQ ID NO: 1787 - DNA, 25 bp, Artificial Sequence
  Description of Artificial Sequence: Synthetic oligonucleotide
accataggacccttagcagcagtgt

SEQ ID NO: 1788 - DNA, 25 bp, Artificial Sequence
  Description of Artificial Sequence: Synthetic oligonucleotide
ccatccccattaaagagagtcctaa

SEQ ID NO: 1789 - DNA, 25 bp, Artificial Sequence
  Description of Artificial Sequence: Synthetic oligonucleotide
ccttgccaagcaccttggaaagtgt

SEQ ID NO: 1790 - DNA, 25 bp, Artificial Sequence
  Description of Artificial Sequence: Synthetic oligonucleotide
gtcaaatggaccctggcggcaaaat

SEQ ID NO: 1791 - DNA, 25 bp, Artificial Sequence
  Description of Artificial Sequence: Synthetic oligonucleotide
agtggagagtgtgcgctaccttgcc

SEQ ID NO: 1792 - DNA, 25 bp, Artificial Sequence
  Description of Artificial Sequence: Synthetic oligonucleotide
aaaaatcatctcaccttgagcccac

SEQ ID NO: 1793 - DNA, 25 bp, Artificial Sequence
  Description of Artificial Sequence: Synthetic oligonucleotide
tggacccaaaaaatcatctcacctt

SEQ ID NO: 1794 - DNA, 25 bp, Artificial Sequence
  Description of Artificial Sequence: Synthetic oligonucleotide
gatctcagacccagtagctgccctt

SEQ ID NO: 1795 - DNA, 25 bp, Artificial Sequence
  Description of Artificial Sequence: Synthetic oligonucleotide
gtcttgagtagacttggacccaaaa

SEQ ID NO: 1796 - DNA, 25 bp, Artificial Sequence
  Description of Artificial Sequence: Synthetic oligonucleotide
cccaccccattgtctaatctgtaga

SEQ ID NO: 1797 - DNA, 25 bp, Artificial Sequence
  Description of Artificial Sequence: Synthetic oligonucleotide
gtgggatctcagacccagtagctgc

SEQ ID NO: 1798 - DNA, 25 bp, Artificial Sequence
  Description of Artificial Sequence: Synthetic oligonucleotide
cacagtcaatggatccacaaggcct

SEQ ID NO: 1799 - DNA, 25 bp, Artificial Sequence
  Description of Artificial Sequence: Synthetic oligonucleotide
gtctaatctgtagaagctaataaat

SEQ ID NO: 1800 - DNA, 25 bp, Artificial Sequence
  Description of Artificial Sequence: Synthetic oligonucleotide
tggaggcaatgtgggatctcagacc

SEQ ID NO: 1801 - DNA, 25 bp, Artificial Sequence
  Description of Artificial Sequence: Synthetic oligonucleotide
aaataatcatccctccttgcctagc

SEQ ID NO: 1802 - DNA, 25 bp, Artificial Sequence
  Description of Artificial Sequence: Synthetic oligonucleotide
ctgggatgcctgtcttgagtagact

SEQ ID NO: 1803 - DNA, 25 bp, Artificial Sequence
  Description of Artificial Sequence: Synthetic oligonucleotide
caattccctgctgtcgtcttagcaa

SEQ ID NO: 1804 - DNA, 25 bp, Artificial Sequence
  Description of Artificial Sequence: Synthetic oligonucleotide
ttccctgctgtcgtcttagcaagaa

SEQ ID NO: 1805 - DNA, 25 bp, Artificial Sequence
  Description of Artificial Sequence: Synthetic oligonucleotide
ttggcctcccctgctgaaggtgggg

SEQ ID NO: 1806 - DNA, 25 bp, Artificial Sequence
  Description of Artificial Sequence: Synthetic oligonucleotide
aggtggggattgcccatccatctgc

SEQ ID NO: 1807 - DNA, 25 bp, Artificial Sequence
  Description of Artificial Sequence: Synthetic oligonucleotide
ctgctgtcgtcttagcaagaagtaa

SEQ ID NO: 1808 - DNA, 25 bp, Artificial Sequence
  Description of Artificial Sequence: Synthetic oligonucleotide
cctgctgtcgtcttagcaagaagta

SEQ ID NO: 1809 - DNA, 25 bp, Artificial Sequence
  Description of Artificial Sequence: Synthetic oligonucleotide
attccctgctgtcgtcttagcaaga

SEQ ID NO: 1810 - DNA, 25 bp, Artificial Sequence
  Description of Artificial Sequence: Synthetic oligonucleotide
tgctgtcgtcttagcaagaagtaaa

SEQ ID NO: 1811 - DNA, 25 bp, Artificial Sequence
  Description of Artificial Sequence: Synthetic oligonucleotide
aattccctgctgtcgtcttagcaag

SEQ ID NO: 1812 - DNA, 25 bp, Artificial Sequence
  Description of Artificial Sequence: Synthetic oligonucleotide
tggcccagctccccaagaaagcctc

SEQ ID NO: 1813 - DNA, 25 bp, Artificial Sequence
  Description of Artificial Sequence: Synthetic oligonucleotide
gcctcccctgctgaaggtggggatt

SEQ ID NO: 1814 - DNA, 25 bp, Artificial Sequence
  Description of Artificial Sequence: Synthetic oligonucleotide
aagagaacgtcatgagtgtaagtgc

SEQ ID NO: 1815 - DNA, 25 bp, Artificial Sequence
  Description of Artificial Sequence: Synthetic oligonucleotide
taccgagtacacagagtacccaagt

SEQ ID NO: 1816 - DNA, 25 bp, Artificial Sequence
  Description of Artificial Sequence: Synthetic oligonucleotide
agtgattctgtgaaaaggacagtga

SEQ ID NO: 1817 - DNA, 25 bp, Artificial Sequence
  Description of Artificial Sequence: Synthetic oligonucleotide
gaaggagcggcaaactgggacatgc

SEQ ID NO: 1818 - DNA, 25 bp, Artificial Sequence
  Description of Artificial Sequence: Synthetic oligonucleotide
aatcagtggaaggagcggcaaactg

SEQ ID NO: 1819 - DNA, 25 bp, Artificial Sequence
  Description of Artificial Sequence: Synthetic oligonucleotide
gagtacacagagtacccaagtgaag

SEQ ID NO: 1820 - DNA, 25 bp, Artificial Sequence
  Description of Artificial Sequence: Synthetic oligonucleotide
catgcagaattgaatttgctcaaaa

SEQ ID NO: 1821 - DNA, 25 bp, Artificial Sequence
  Description of Artificial Sequence: Synthetic oligonucleotide
gaacgtcatgagtgtaagtgcaaat

SEQ ID NO: 1822 - DNA, 25 bp, Artificial Sequence
  Description of Artificial Sequence: Synthetic oligonucleotide
tgagtgtaagtgcaaatcagtggaa

SEQ ID NO: 1823 - DNA, 25 bp, Artificial Sequence
  Description of Artificial Sequence: Synthetic oligonucleotide
ggacatgcagaattgaatttgctca

SEQ ID NO: 1824 - DNA, 25 bp, Artificial Sequence
  Description of Artificial Sequence: Synthetic oligonucleotide
acacagagtacccaagtgaagagaa

SEQ ID NO: 1825 - DNA, 25 bp, Artificial Sequence
  Description of Artificial Sequence: Synthetic oligonucleotide
gaagcttcccctggctaacttgcta

SEQ ID NO: 1826 - DNA, 25 bp, Artificial Sequence
  Description of Artificial Sequence: Synthetic oligonucleotide
ccagaagtttgtgttcatacataat

SEQ ID NO: 1827 - DNA, 25 bp, Artificial Sequence
  Description of Artificial Sequence: Synthetic oligonucleotide
aattgttttccacgctggatcataa

SEQ ID NO: 1828 - DNA, 25 bp, Artificial Sequence
  Description of Artificial Sequence: Synthetic oligonucleotide
ggaggaaacgtgtatacctgtaaca

SEQ ID NO: 1829 - DNA, 25 bp, Artificial Sequence
  Description of Artificial Sequence: Synthetic oligonucleotide
tacataattgttttccacgctggat

SEQ ID NO: 1830 - DNA, 25 bp, Artificial Sequence
  Description of Artificial Sequence: Synthetic oligonucleotide
gggagccacatgaagcttcccctgg

SEQ ID NO: 1831 - DNA, 25 bp, Artificial Sequence
  Description of Artificial Sequence: Synthetic oligonucleotide
ttccacgctggatcataatgtgacg

SEQ ID NO: 1832 - DNA, 25 bp, Artificial Sequence
  Description of Artificial Sequence: Synthetic oligonucleotide
gtgtggccgtctgcttgctaaaaaa

SEQ ID NO: 1833 - DNA, 25 bp, Artificial Sequence
  Description of Artificial Sequence: Synthetic oligonucleotide
cagggcccctcttgctgtttttacc

SEQ ID NO: 1834 - DNA, 25 bp, Artificial Sequence
  Description of Artificial Sequence: Synthetic oligonucleotide
tggctaacttgctaccccgcagcaa

SEQ ID NO: 1835 - DNA, 25 bp, Artificial Sequence
  Description of Artificial Sequence: Synthetic oligonucleotide
ctggatcataatgtgacgtgcagtt

SEQ ID NO: 1836 - DNA, 25 bp, Artificial Sequence
  Description of Artificial Sequence: Synthetic oligonucleotide
tttgaatctgaatcagccagtctca

SEQ ID NO: 1837 - DNA, 25 bp, Artificial Sequence
  Description of Artificial Sequence: Synthetic oligonucleotide
cgattttcgggctgagaaggcagta

SEQ ID NO: 1838 - DNA, 25 bp, Artificial Sequence
  Description of Artificial Sequence: Synthetic oligonucleotide
ctcagatgccccaaagtttcggttc

SEQ ID NO: 1839 - DNA, 25 bp, Artificial Sequence
  Description of Artificial Sequence: Synthetic oligonucleotide
ctgcccacagtctttccgtgtgatt

SEQ ID NO: 1840 - DNA, 25 bp, Artificial Sequence
  Description of Artificial Sequence: Synthetic oligonucleotide
agatgccccaaagtttcggttccta

SEQ ID NO: 1841 - DNA, 25 bp, Artificial Sequence
  Description of Artificial Sequence: Synthetic oligonucleotide
tctttccgtgtgattgtctttgaat

SEQ ID NO: 1842 - DNA, 25 bp, Artificial Sequence
  Description of Artificial Sequence: Synthetic oligonucleotide
gagcctgagagagacggcgattttc

SEQ ID NO: 1843 - DNA, 25 bp, Artificial Sequence
  Description of Artificial Sequence: Synthetic oligonucleotide
cacagtctttccgtgtgattgtctt

SEQ ID NO: 1844 - DNA, 25 bp, Artificial Sequence
  Description of Artificial Sequence: Synthetic oligonucleotide
tgatctgatccccaagacatgtgga

SEQ ID NO: 1845 - DNA, 25 bp, Artificial Sequence
  Description of Artificial Sequence: Synthetic oligonucleotide
ggcatgatctgatccccaagacatg

SEQ ID NO: 1846 - DNA, 25 bp, Artificial Sequence
  Description of Artificial Sequence: Synthetic oligonucleotide
attgtctttgaatctgaatcagcca

SEQ ID NO: 1847 - DNA, 25 bp, Artificial Sequence
  Description of Artificial Sequence: Synthetic oligonucleotide
atgagcaaagtcaccaatcccaagc

SEQ ID NO: 1848 - DNA, 25 bp, Artificial Sequence
  Description of Artificial Sequence: Synthetic oligonucleotide
gagcaaagtcaccaatcccaagcaa

SEQ ID NO: 1849 - DNA, 25 bp, Artificial Sequence
  Description of Artificial Sequence: Synthetic oligonucleotide
accaatcccaagcaagcctagagct

SEQ ID NO: 1850 - DNA, 25 bp, Artificial Sequence
  Description of Artificial Sequence: Synthetic oligonucleotide
tcatgagcaaagtcaccaatcccaa

SEQ ID NO: 1851 - DNA, 25 bp, Artificial Sequence
  Description of Artificial Sequence: Synthetic oligonucleotide
tatccttggaaggtgacagcgattc

SEQ ID NO: 1852 - DNA, 25 bp, Artificial Sequence
  Description of Artificial Sequence: Synthetic oligonucleotide
agcctagagcttgccatcaagcagt

SEQ ID NO: 1853 - DNA, 25 bp, Artificial Sequence
  Description of Artificial Sequence: Synthetic oligonucleotide
aagcaagcctagagcttgccatcaa

SEQ ID NO: 1854 - DNA, 25 bp, Artificial Sequence
  Description of Artificial Sequence: Synthetic oligonucleotide
tgcttatccttggaaggtgacagcg

SEQ ID NO: 1855 - DNA, 25 bp, Artificial Sequence
  Description of Artificial Sequence: Synthetic oligonucleotide
aaagtcaccaatcccaagcaagcct

SEQ ID NO: 1856 - DNA, 25 bp, Artificial Sequence
  Description of Artificial Sequence: Synthetic oligonucleotide
aagcctagagcttgccatcaagcag

SEQ ID NO: 1857 - DNA, 25 bp, Artificial Sequence
  Description of Artificial Sequence: Synthetic oligonucleotide
tgacagcaataaataatttcgttgg

SEQ ID NO: 1858 - DNA, 25 bp, Artificial Sequence
  Description of Artificial Sequence: Synthetic oligonucleotide
tcatgagcaaagtcaccaatcccaa

SEQ ID NO: 1859 - DNA, 25 bp, Artificial Sequence
  Description of Artificial Sequence: Synthetic oligonucleotide
atgagcaaagtcaccaatcccaagc

SEQ ID NO: 1860 - DNA, 25 bp, Artificial Sequence
  Description of Artificial Sequence: Synthetic oligonucleotide
gagcaaagtcaccaatcccaagcaa

SEQ ID NO: 1861 - DNA, 25 bp, Artificial Sequence
  Description of Artificial Sequence: Synthetic oligonucleotide
aaagtcaccaatcccaagcaagcct

SEQ ID NO: 1862 - DNA, 25 bp, Artificial Sequence
  Description of Artificial Sequence: Synthetic oligonucleotide
accaatcccaagcaagcctagagct

SEQ ID NO: 1863 - DNA, 25 bp, Artificial Sequence
  Description of Artificial Sequence: Synthetic oligonucleotide
aagcaagcctagagcttgccatcaa

SEQ ID NO: 1864 - DNA, 25 bp, Artificial Sequence
  Description of Artificial Sequence: Synthetic oligonucleotide
aagcctagagcttgccatcaagcag

SEQ ID NO: 1865 - DNA, 25 bp, Artificial Sequence
  Description of Artificial Sequence: Synthetic oligonucleotide
agcctagagcttgccatcaagcagt

SEQ ID NO: 1866 - DNA, 25 bp, Artificial Sequence
  Description of Artificial Sequence: Synthetic oligonucleotide
tgcttatccttggaaggtgacagcg

SEQ ID NO: 1867 - DNA, 25 bp, Artificial Sequence
  Description of Artificial Sequence: Synthetic oligonucleotide
tatccttggaaggtgacagcgattc

SEQ ID NO: 1868 - DNA, 25 bp, Artificial Sequence
  Description of Artificial Sequence: Synthetic oligonucleotide
tgacagcaataaataatttcgttgg

SEQ ID NO: 1869 - DNA, 25 bp, Artificial Sequence
  Description of Artificial Sequence: Synthetic oligonucleotide
tggttttggcataatagctgcattt

SEQ ID NO: 1870 - DNA, 25 bp, Artificial Sequence
  Description of Artificial Sequence: Synthetic oligonucleotide
tgacctttggccccaaccacaagtg

SEQ ID NO: 1871 - DNA, 25 bp, Artificial Sequence
  Description of Artificial Sequence: Synthetic oligonucleotide
gaaaataagtgctttgggcgaactg

SEQ ID NO: 1872 - DNA, 25 bp, Artificial Sequence
  Description of Artificial Sequence: Synthetic oligonucleotide
tgaccaaagaaagcccaagttctcc

SEQ ID NO: 1873 - DNA, 25 bp, Artificial Sequence
  Description of Artificial Sequence: Synthetic oligonucleotide
gaccatattaacacagctgactcct

SEQ ID NO: 1874 - DNA, 25 bp, Artificial Sequence
  Description of Artificial Sequence: Synthetic oligonucleotide
ctccagtttacttaaggtagaaaga

SEQ ID NO: 1875 - DNA, 25 bp, Artificial Sequence
  Description of Artificial Sequence: Synthetic oligonucleotide
ctttgggcgaactgtattcctttta

SEQ ID NO: 1876 - DNA, 25 bp, Artificial Sequence
  Description of Artificial Sequence: Synthetic oligonucleotide
ttgaccatattaacacagctgactc

SEQ ID NO: 1877 - DNA, 25 bp, Artificial Sequence
  Description of Artificial Sequence: Synthetic oligonucleotide
gctgaccaaagaaagcccaagttct

SEQ ID NO: 1878 - DNA, 25 bp, Artificial Sequence
  Description of Artificial Sequence: Synthetic oligonucleotide
gttttggcataatagctgcatttcc

SEQ ID NO: 1879 - DNA, 25 bp, Artificial Sequence
  Description of Artificial Sequence: Synthetic oligonucleotide
tgctttgggcgaactgtattccttt

SEQ ID NO: 1880 - DNA, 25 bp, Artificial Sequence
  Description of Artificial Sequence: Synthetic oligonucleotide
aatgcatattttagccactttagag

SEQ ID NO: 1881 - DNA, 25 bp, Artificial Sequence
  Description of Artificial Sequence: Synthetic oligonucleotide
cattgcaacatttccatcagacagc

SEQ ID NO: 1882 - DNA, 25 bp, Artificial Sequence
  Description of Artificial Sequence: Synthetic oligonucleotide
gtctctagaattaaatgtactcatt

SEQ ID NO: 1883 - DNA, 25 bp, Artificial Sequence
  Description of Artificial Sequence: Synthetic oligonucleotide
aacctcataggcacagagtttccaa

SEQ ID NO: 1884 - DNA, 25 bp, Artificial Sequence
  Description of Artificial Sequence: Synthetic oligonucleotide
gaatatcttcacgaacttgaccctc

SEQ ID NO: 1885 - DNA, 25 bp, Artificial Sequence
  Description of Artificial Sequence: Synthetic oligonucleotide
ctactccttacagtctctagaatta

SEQ ID NO: 1886 - DNA, 25 bp, Artificial Sequence
  Description of Artificial Sequence: Synthetic oligonucleotide
gacagcatttcaattccagtattat

SEQ ID NO: 1887 - DNA, 25 bp, Artificial Sequence
  Description of Artificial Sequence: Synthetic oligonucleotide
atcagacagcatttcaattccagta

SEQ ID NO: 1888 - DNA, 25 bp, Artificial Sequence
  Description of Artificial Sequence: Synthetic oligonucleotide
tttagccactttagagaaacctcat

SEQ ID NO: 1889 - DNA, 25 bp, Artificial Sequence
  Description of Artificial Sequence: Synthetic oligonucleotide
ccacattgcaacatttccatcagac

SEQ ID NO: 1890 - DNA, 25 bp, Artificial Sequence
  Description of Artificial Sequence: Synthetic oligonucleotide
tagagaaacctcataggcacagagt

SEQ ID NO: 1891 - DNA, 25 bp, Artificial Sequence
  Description of Artificial Sequence: Synthetic oligonucleotide
gagttgccacaggagctaacacgct

SEQ ID NO: 1892 - DNA, 25 bp, Artificial Sequence
  Description of Artificial Sequence: Synthetic oligonucleotide
tccagaatgtcctcccaataaaact

SEQ ID NO: 1893 - DNA, 25 bp, Artificial Sequence
  Description of Artificial Sequence: Synthetic oligonucleotide
ctcttgctgggagcccgtccagaat

SEQ ID NO: 1894 - DNA, 25 bp, Artificial Sequence
  Description of Artificial Sequence: Synthetic oligonucleotide
agctaacacgctgggaggcagttgg

SEQ ID NO: 1895 - DNA, 25 bp, Artificial Sequence
  Description of Artificial Sequence: Synthetic oligonucleotide
ctctgctctaggatttgggttgaaa

SEQ ID NO: 1896 - DNA, 25 bp, Artificial Sequence
  Description of Artificial Sequence: Synthetic oligonucleotide
ccctctgctctaggatttgggttga

SEQ ID NO: 1897 - DNA, 25 bp, Artificial Sequence
  Description of Artificial Sequence: Synthetic oligonucleotide
gaatgtcctcccaataaaactccat

SEQ ID NO: 1898 - DNA, 25 bp, Artificial Sequence
  Description of Artificial Sequence: Synthetic oligonucleotide
gtgaactttgtgtagccgaggccgc

SEQ ID NO: 1899 - DNA, 25 bp, Artificial Sequence
  Description of Artificial Sequence: Synthetic oligonucleotide
gaccaacaggagagagctcttgagt

SEQ ID NO: 1900 - DNA, 25 bp, Artificial Sequence
  Description of Artificial Sequence: Synthetic oligonucleotide
ctcttgagtgggctagtgactcccc

SEQ ID NO: 1901 - DNA, 25 bp, Artificial Sequence
  Description of Artificial Sequence: Synthetic oligonucleotide
gccacaggagctaacacgctgggag

SEQ ID NO: 1902 - DNA, 25 bp, Artificial Sequence
  Description of Artificial Sequence: Synthetic oligonucleotide
aaacttctggtaaggcatttattaa

SEQ ID NO: 1903 - DNA, 25 bp, Artificial Sequence
  Description of Artificial Sequence: Synthetic oligonucleotide
atagccaagtaaatagtcaaggaaa

SEQ ID NO: 1904 - DNA, 25 bp, Artificial Sequence
  Description of Artificial Sequence: Synthetic oligonucleotide
acaagacatagtgcaaaggatatat

SEQ ID NO: 1905 - DNA, 25 bp, Artificial Sequence
  Description of Artificial Sequence: Synthetic oligonucleotide
gaagagtagatgttttaaaagacct

SEQ ID NO: 1906 - DNA, 25 bp, Artificial Sequence
  Description of Artificial Sequence: Synthetic oligonucleotide
aggatatataaagccaaaagttcat

SEQ ID NO: 1907 - DNA, 25 bp, Artificial Sequence
  Description of Artificial Sequence: Synthetic oligonucleotide
ttctggtaaggcatttattaaaaga

SEQ ID NO: 1908 - DNA, 25 bp, Artificial Sequence
  Description of Artificial Sequence: Synthetic oligonucleotide
aacaagacatagtgcaaaggatata

SEQ ID NO: 1909 - DNA, 25 bp, Artificial Sequence
  Description of Artificial Sequence: Synthetic oligonucleotide
aagacctgattttaaaagaatgacc

SEQ ID NO: 1910 - DNA, 25 bp, Artificial Sequence
  Description of Artificial Sequence: Synthetic oligonucleotide
aagaatgaccaaaaatagccaagta

SEQ ID NO: 1911 - DNA, 25 bp, Artificial Sequence
  Description of Artificial Sequence: Synthetic oligonucleotide
agccaagtaaatagtcaaggaaata

SEQ ID NO: 1912 - DNA, 25 bp, Artificial Sequence
  Description of Artificial Sequence: Synthetic oligonucleotide
aatggagaacaagacatagtgcaaa

SEQ ID NO: 1913 - DNA, 25 bp, Artificial Sequence
  Description of Artificial Sequence: Synthetic oligonucleotide
tgaattacctctcgatggttctctc

SEQ ID NO: 1914 - DNA, 25 bp, Artificial Sequence
  Description of Artificial Sequence: Synthetic oligonucleotide
ggaactaccattcatgtgcggaaat

SEQ ID NO: 1915 - DNA, 25 bp, Artificial Sequence
  Description of Artificial Sequence: Synthetic oligonucleotide
tgaggccgggaggatgcgtgcaggt

SEQ ID NO: 1916 - DNA, 25 bp, Artificial Sequence
  Description of Artificial Sequence: Synthetic oligonucleotide
gtactccatgtgaattacctctcga

SEQ ID NO: 1917 - DNA, 25 bp, Artificial Sequence
  Description of Artificial Sequence: Synthetic oligonucleotide
attacctctcgatggttctctcctg

SEQ ID NO: 1918 - DNA, 25 bp, Artificial Sequence
  Description of Artificial Sequence: Synthetic oligonucleotide
gaattacacacttcagttgggcgaa

SEQ ID NO: 1919 - DNA, 25 bp, Artificial Sequence
  Description of Artificial Sequence: Synthetic oligonucleotide
ggcgaactgtactccatgtgaatta

SEQ ID NO: 1920 - DNA, 25 bp, Artificial Sequence
  Description of Artificial Sequence: Synthetic oligonucleotide
tacacacttcagttgggcgaactgt

SEQ ID NO: 1921 - DNA, 25 bp, Artificial Sequence
  Description of Artificial Sequence: Synthetic oligonucleotide
actaccattcatgtgcggaaataaa

SEQ ID NO: 1922 - DNA, 25 bp, Artificial Sequence
  Description of Artificial Sequence: Synthetic oligonucleotide
gttgggcgaactgtactccatgtga

SEQ ID NO: 1923 - DNA, 25 bp, Artificial Sequence
  Description of Artificial Sequence: Synthetic oligonucleotide
tatgctgaaaactcgaattacacac

SEQ ID NO: 1924 - DNA, 25 bp, Artificial Sequence
  Description of Artificial Sequence: Synthetic oligonucleotide
cgtagtagctgttcaactcctagta

SEQ ID NO: 1925 - DNA, 25 bp, Artificial Sequence
  Description of Artificial Sequence: Synthetic oligonucleotide
gtagctgttcaactcctagtactta

SEQ ID NO: 1926 - DNA, 25 bp, Artificial Sequence
  Description of Artificial Sequence: Synthetic oligonucleotide
aactcctagtacttagaaatacacg

SEQ ID NO: 1927 - DNA, 25 bp, Artificial Sequence
  Description of Artificial Sequence: Synthetic oligonucleotide
tacacgtatggttaatgttcagtcc

SEQ ID NO: 1928 - DNA, 25 bp, Artificial Sequence
  Description of Artificial Sequence: Synthetic oligonucleotide
gtatggttaatgttcagtccaacaa

SEQ ID NO: 1929 - DNA, 25 bp, Artificial Sequence
  Description of Artificial Sequence: Synthetic oligonucleotide
aacaaaccacacacagtaaatgttt

SEQ ID NO: 1930 - DNA, 25 bp, Artificial Sequence
  Description of Artificial Sequence: Synthetic oligonucleotide
tgtttattaatagtcatggttcgta

SEQ ID NO: 1931 - DNA, 25 bp, Artificial Sequence
  Description of Artificial Sequence: Synthetic oligonucleotide
atagtcatggttcgtattttaggtg

SEQ ID NO: 1932 - DNA, 25 bp, Artificial Sequence
  Description of Artificial Sequence: Synthetic oligonucleotide
gtttgttaaaacgatagctatattc

SEQ ID NO: 1933 - DNA, 25 bp, Artificial Sequence
  Description of Artificial Sequence: Synthetic oligonucleotide
ggacttttgaggttaaagacagtca

SEQ ID NO: 1934 - DNA, 25 bp, Artificial Sequence
  Description of Artificial Sequence: Synthetic oligonucleotide
gtcatataaacgtcctgtttctgtt

SEQ ID NO: 1935 - DNA, 25 bp, Artificial Sequence
  Description of Artificial Sequence: Synthetic oligonucleotide
attttttcctatgtatacatgccta

SEQ ID NO: 1936 - DNA, 25 bp, Artificial Sequence
  Description of Artificial Sequence: Synthetic oligonucleotide
ttcctatgtatacatgcctatgaga

SEQ ID NO: 1937 - DNA, 25 bp, Artificial Sequence
  Description of Artificial Sequence: Synthetic oligonucleotide
aacaattatagcactatattgtaat

SEQ ID NO: 1938 - DNA, 25 bp, Artificial Sequence
  Description of Artificial Sequence: Synthetic oligonucleotide
acatgcctatgagaaagtttagttt

SEQ ID NO: 1939 - DNA, 25 bp, Artificial Sequence
  Description of Artificial Sequence: Synthetic oligonucleotide
gtaaattaggcccactgagagatga

SEQ ID NO: 1940 - DNA, 25 bp, Artificial Sequence
  Description of Artificial Sequence: Synthetic oligonucleotide
ggcccactgagagatgaacaataat

SEQ ID NO: 1941 - DNA, 25 bp, Artificial Sequence
  Description of Artificial Sequence: Synthetic oligonucleotide
tagtttgtaaattaggcccactgag

SEQ ID NO: 1942 - DNA, 25 bp, Artificial Sequence
  Description of Artificial Sequence: Synthetic oligonucleotide
gtttgtaaattaggcccactgagag

SEQ ID NO: 1943 - DNA, 25 bp, Artificial Sequence
  Description of Artificial Sequence: Synthetic oligonucleotide
gaacaattatagcactatattgtaa

SEQ ID NO: 1944 - DNA, 25 bp, Artificial Sequence
  Description of Artificial Sequence: Synthetic oligonucleotide
aattaggcccactgagagatgaaca

SEQ ID NO: 1945 - DNA, 25 bp, Artificial Sequence
  Description of Artificial Sequence: Synthetic oligonucleotide
tgtatacatgcctatgagaaagttt

SEQ ID NO: 1946 - DNA, 25 bp, Artificial Sequence
  Description of Artificial Sequence: Synthetic oligonucleotide
gttagttgtatgagtctgttttcac

SEQ ID NO: 1947 - DNA, 25 bp, Artificial Sequence
  Description of Artificial Sequence: Synthetic oligonucleotide
tagttgtatgagtctgttttcacgc

SEQ ID NO: 1948 - DNA, 25 bp, Artificial Sequence
  Description of Artificial Sequence: Synthetic oligonucleotide
caaaagaagaggtttagtggactta

SEQ ID NO: 1949 - DNA, 25 bp, Artificial Sequence
  Description of Artificial Sequence: Synthetic oligonucleotide
gaggagaaagtcacgtggatggcag

SEQ ID NO: 1950 - DNA, 25 bp, Artificial Sequence
  Description of Artificial Sequence: Synthetic oligonucleotide
ggagaaagtcacgtggatggcagca

SEQ ID NO: 1951 - DNA, 25 bp, Artificial Sequence
  Description of Artificial Sequence: Synthetic oligonucleotide
gagagcttgtgcaggcaaactctta

SEQ ID NO: 1952 - DNA, 25 bp, Artificial Sequence
  Description of Artificial Sequence: Synthetic oligonucleotide
ttgtgcaggcaaactcttattttta

SEQ ID NO: 1953 - DNA, 25 bp, Artificial Sequence
  Description of Artificial Sequence: Synthetic oligonucleotide
tttttaaaagcatcagatatcgcgt

SEQ ID NO: 1954 - DNA, 25 bp, Artificial Sequence
  Description of Artificial Sequence: Synthetic oligonucleotide
taaaagcatcagatatcgcgtgaac

SEQ ID NO: 1955 - DNA, 25 bp, Artificial Sequence
  Description of Artificial Sequence: Synthetic oligonucleotide
aaagcatcagatatcgcgtgaaccc

SEQ ID NO: 1956 - DNA, 25 bp, Artificial Sequence
  Description of Artificial Sequence: Synthetic oligonucleotide
agcatcagatatcgcgtgaaccccg

SEQ ID NO: 1957 - DNA, 25 bp, Artificial Sequence
  Description of Artificial Sequence: Synthetic oligonucleotide
gagtccagctggaagcaaatgctaa

SEQ ID NO: 1958 - DNA, 25 bp, Artificial Sequence
  Description of Artificial Sequence: Synthetic oligonucleotide
gaacagctatgtatacttaagcttg

SEQ ID NO: 1959 - DNA, 25 bp, Artificial Sequence
  Description of Artificial Sequence: Synthetic oligonucleotide
ttgaggatacaaaccatttaaaaga

SEQ ID NO: 1960 - DNA, 25 bp, Artificial Sequence
  Description of Artificial Sequence: Synthetic oligonucleotide
atcattgaggatacaaaccatttaa

SEQ ID NO: 1961 - DNA, 25 bp, Artificial Sequence
  Description of Artificial Sequence: Synthetic oligonucleotide
gaatataagataaagagtccagctg

SEQ ID NO: 1962 - DNA, 25 bp, Artificial Sequence
  Description of Artificial Sequence: Synthetic oligonucleotide
gctaaatgccctgatgtgccagaaa

SEQ ID NO: 1963 - DNA, 25 bp, Artificial Sequence
  Description of Artificial Sequence: Synthetic oligonucleotide
ttgccatatgttaaataaggtgaac

SEQ ID NO: 1964 - DNA, 25 bp, Artificial Sequence
  Description of Artificial Sequence: Synthetic oligonucleotide
gacatttgctaaatgccctgatgtg

SEQ ID NO: 1965 - DNA, 25 bp, Artificial Sequence
  Description of Artificial Sequence: Synthetic oligonucleotide
gtccagctggaagcaaatgctaaca

SEQ ID NO: 1966 - DNA, 25 bp, Artificial Sequence
  Description of Artificial Sequence: Synthetic oligonucleotide
agctatgtatacttaagcttgtatt

SEQ ID NO: 1967 - DNA, 25 bp, Artificial Sequence
  Description of Artificial Sequence: Synthetic oligonucleotide
ttgctaaatgccctgatgtgccaga

SEQ ID NO: 1968 - DNA, 25 bp, Artificial Sequence
  Description of Artificial Sequence: Synthetic oligonucleotide
cttaagcttgtattttggaaggaaa

SEQ ID NO: 1969 - DNA, 25 bp, Artificial Sequence
  Description of Artificial Sequence: Synthetic oligonucleotide
gagtccagctggaagcaaatgctaa

SEQ ID NO: 1970 - DNA, 25 bp, Artificial Sequence
  Description of Artificial Sequence: Synthetic oligonucleotide
aaacacagcctttctctggccatga

SEQ ID NO: 1971 - DNA, 25 bp, Artificial Sequence
  Description of Artificial Sequence: Synthetic oligonucleotide
gaacagctatgtatacttaagcttg

SEQ ID NO: 1972 - DNA, 25 bp, Artificial Sequence
  Description of Artificial Sequence: Synthetic oligonucleotide
atcattgaggatacaaaccatttaa

SEQ ID NO: 1973 - DNA, 25 bp, Artificial Sequence
  Description of Artificial Sequence: Synthetic oligonucleotide
gaatataagataaagagtccagctg

SEQ ID NO: 1974 - DNA, 25 bp, Artificial Sequence
  Description of Artificial Sequence: Synthetic oligonucleotide
gctaaatgccctgatgtgccagaaa

SEQ ID NO: 1975 - DNA, 25 bp, Artificial Sequence
  Description of Artificial Sequence: Synthetic oligonucleotide
gttcattcattcaaaggacatttgc

SEQ ID NO: 1976 - DNA, 25 bp, Artificial Sequence
  Description of Artificial Sequence: Synthetic oligonucleotide
gacatttgctaaatgccctgatgtg

SEQ ID NO: 1977 - DNA, 25 bp, Artificial Sequence
  Description of Artificial Sequence: Synthetic oligonucleotide
ctttctctggccatgaacagctatg

SEQ ID NO: 1978 - DNA, 25 bp, Artificial Sequence
  Description of Artificial Sequence: Synthetic oligonucleotide
atgaatcctacattttgccatatgt

SEQ ID NO: 1979 - DNA, 25 bp, Artificial Sequence
  Description of Artificial Sequence: Synthetic oligonucleotide
actagcatttgttttcgtatctagt

SEQ ID NO: 1980 - DNA, 25 bp, Artificial Sequence
  Description of Artificial Sequence: Synthetic oligonucleotide
gcatttgttttcgtatctagtatta

SEQ ID NO: 1981 - DNA, 25 bp, Artificial Sequence
  Description of Artificial Sequence: Synthetic oligonucleotide
ccaagaatttaagcctttttgcggg

SEQ ID NO: 1982 - DNA, 25 bp, Artificial Sequence
  Description of Artificial Sequence: Synthetic oligonucleotide
gggggcgttgatatgtgcattataa

SEQ ID NO: 1983 - DNA, 25 bp, Artificial Sequence
  Description of Artificial Sequence: Synthetic oligonucleotide
gtccaagaaaaatgccgcgtcgtta

SEQ ID NO: 1984 - DNA, 25 bp, Artificial Sequence
  Description of Artificial Sequence: Synthetic oligonucleotide
aaaatgccgcgtcgttacatgacct

SEQ ID NO: 1985 - DNA, 25 bp, Artificial Sequence
  Description of Artificial Sequence: Synthetic oligonucleotide
gcgtcgttacatgacctcgatcttt

SEQ ID NO: 1986 - DNA, 25 bp, Artificial Sequence
  Description of Artificial Sequence: Synthetic oligonucleotide
ttacatgacctcgatctttctttct

SEQ ID NO: 1987 - DNA, 25 bp, Artificial Sequence
  Description of Artificial Sequence: Synthetic oligonucleotide
ccctgcaatcctacacggcaataaa

SEQ ID NO: 1988 - DNA, 25 bp, Artificial Sequence
  Description of Artificial Sequence: Synthetic oligonucleotide
aatcctacacggcaataaaataatt

SEQ ID NO: 1989 - DNA, 25 bp, Artificial Sequence
  Description of Artificial Sequence: Synthetic oligonucleotide
gaatgtctatgttaaactaagtttt

SEQ ID NO: 1990 - DNA, 25 bp, Artificial Sequence
  Description of Artificial Sequence: Synthetic oligonucleotide
tggagagtcacatgtcactagcatt

SEQ ID NO: 1991 - DNA, 25 bp, Artificial Sequence
  Description of Artificial Sequence: Synthetic oligonucleotide
gcatttgttttcgtatctagtatta

SEQ ID NO: 1992 - DNA, 25 bp, Artificial Sequence
  Description of Artificial Sequence: Synthetic oligonucleotide
agtctggaaaatgcactctggcaaa

SEQ ID NO: 1993 - DNA, 25 bp, Artificial Sequence
  Description of Artificial Sequence: Synthetic oligonucleotide
atgcactctggcaaaggttaccaag

SEQ ID NO: 1994 - DNA, 25 bp, Artificial Sequence
  Description of Artificial Sequence: Synthetic oligonucleotide
ccaagaatttaagcctttttgcggg

SEQ ID NO: 1995 - DNA, 25 bp, Artificial Sequence
  Description of Artificial Sequence: Synthetic oligonucleotide
tatcatttaagaaaccgtccaagaa

SEQ ID NO: 1996 - DNA, 25 bp, Artificial Sequence
  Description of Artificial Sequence: Synthetic oligonucleotide
gtccaagaaaaatgccgcgtcgtta

SEQ ID NO: 1997 - DNA, 25 bp, Artificial Sequence
  Description of Artificial Sequence: Synthetic oligonucleotide
aaaatgccgcgtcgttacatgacct

SEQ ID NO: 1998 - DNA, 25 bp, Artificial Sequence
  Description of Artificial Sequence: Synthetic oligonucleotide
gcgtcgttacatgacctcgatcttt

SEQ ID NO: 1999 - DNA, 25 bp, Artificial Sequence
  Description of Artificial Sequence: Synthetic oligonucleotide
ttacatgacctcgatctttctttct

SEQ ID NO: 2000 - DNA, 25 bp, Artificial Sequence
  Description of Artificial Sequence: Synthetic oligonucleotide
ccctgcaatcctacacggcaataaa

SEQ ID NO: 2001 - DNA, 25 bp, Artificial Sequence
  Description of Artificial Sequence: Synthetic oligonucleotide
gagataaacttttggtaaggcattt

SEQ ID NO: 2002 - DNA, 25 bp, Artificial Sequence
  Description of Artificial Sequence: Synthetic oligonucleotide
caacacctcagtgaatttaaaagag

SEQ ID NO: 2003 - DNA, 25 bp, Artificial Sequence
  Description of Artificial Sequence: Synthetic oligonucleotide
gaatatggccaaaacacaacacctc

SEQ ID NO: 2004 - DNA, 25 bp, Artificial Sequence
  Description of Artificial Sequence: Synthetic oligonucleotide
taaatgcaagttcctgaatatggcc

SEQ ID NO: 2005 - DNA, 25 bp, Artificial Sequence
  Description of Artificial Sequence: Synthetic oligonucleotide
tttggtaaggcatttaaaggaaata

SEQ ID NO: 2006 - DNA, 25 bp, Artificial Sequence
  Description of Artificial Sequence: Synthetic oligonucleotide
agttcctgaatatggccaaaacaca

SEQ ID NO: 2007 - DNA, 25 bp, Artificial Sequence
  Description of Artificial Sequence: Synthetic oligonucleotide
aaagccataaatactgaaatgtaga

SEQ ID NO: 2008 - DNA, 25 bp, Artificial Sequence
  Description of Artificial Sequence: Synthetic oligonucleotide
gtagaaagttcattattaaatggga

SEQ ID NO: 2009 - DNA, 25 bp, Artificial Sequence
  Description of Artificial Sequence: Synthetic oligonucleotide
gagaatatcaaagtaaaccagaaaa

SEQ ID NO: 2010 - DNA, 25 bp, Artificial Sequence
  Description of Artificial Sequence: Synthetic oligonucleotide
aaaacacaacacctcagtgaattta

SEQ ID NO: 2011 - DNA, 25 bp, Artificial Sequence
  Description of Artificial Sequence: Synthetic oligonucleotide
atggccaaaacacaacacctcagtg

SEQ ID NO: 2012 - DNA, 25 bp, Artificial Sequence
  Description of Artificial Sequence: Synthetic oligonucleotide
attttttcctatgtatacatgccta

SEQ ID NO: 2013 - DNA, 25 bp, Artificial Sequence
  Description of Artificial Sequence: Synthetic oligonucleotide
ttcctatgtatacatgcctatgaga

SEQ ID NO: 2014 - DNA, 25 bp, Artificial Sequence
  Description of Artificial Sequence: Synthetic oligonucleotide
tgtaaattaggcacactgagagatg

SEQ ID NO: 2015 - DNA, 25 bp, Artificial Sequence
  Description of Artificial Sequence: Synthetic oligonucleotide
acatgcctatgagaaagtttagttt

SEQ ID NO: 2016 - DNA, 25 bp, Artificial Sequence
  Description of Artificial Sequence: Synthetic oligonucleotide
tagtttgtaaattaggcacactgag

SEQ ID NO: 2017 - DNA, 25 bp, Artificial Sequence
  Description of Artificial Sequence: Synthetic oligonucleotide
ccaaaccctgtatgtactatttatt

SEQ ID NO: 2018 - DNA, 25 bp, Artificial Sequence
  Description of Artificial Sequence: Synthetic oligonucleotide
aattaggcacactgagagatgaaca

SEQ ID NO: 2019 - DNA, 25 bp, Artificial Sequence
  Description of Artificial Sequence: Synthetic oligonucleotide
aaccctgtatgtactatttattttt

SEQ ID NO: 2020 - DNA, 25 bp, Artificial Sequence
  Description of Artificial Sequence: Synthetic oligonucleotide
tgcctatgagaaagtttagtttgta

SEQ ID NO: 2021 - DNA, 25 bp, Artificial Sequence
  Description of Artificial Sequence: Synthetic oligonucleotide
cctatgtatacatgcctatgagaaa

SEQ ID NO: 2022 - DNA, 25 bp, Artificial Sequence
  Description of Artificial Sequence: Synthetic oligonucleotide
tgtatacatgcctatgagaaagttt

SEQ ID NO: 2023 - DNA, 25 bp, Artificial Sequence
  Description of Artificial Sequence: Synthetic oligonucleotide
gagttctatgcattcgtttctgagc

SEQ ID NO: 2024 - DNA, 25 bp, Artificial Sequence
  Description of Artificial Sequence: Synthetic oligonucleotide
gacaatcttcaatcgtggagtagta

SEQ ID NO: 2025 - DNA, 25 bp, Artificial Sequence
  Description of Artificial Sequence: Synthetic oligonucleotide
ctatgcattcgtttctgagcacatg

SEQ ID NO: 2026 - DNA, 25 bp, Artificial Sequence
  Description of Artificial Sequence: Synthetic oligonucleotide
tctaaataaagggtatgcccctctt

SEQ ID NO: 2027 - DNA, 25 bp, Artificial Sequence
  Description of Artificial Sequence: Synthetic oligonucleotide
agtattccagcctatggatgcccca

SEQ ID NO: 2028 - DNA, 25 bp, Artificial Sequence
  Description of Artificial Sequence: Synthetic oligonucleotide
cacattcataatctaacttgctcat

SEQ ID NO: 2029 - DNA, 25 bp, Artificial Sequence
  Description of Artificial Sequence: Synthetic oligonucleotide
atctacatgacaatcttcaatcgtg

SEQ ID NO: 2030 - DNA, 25 bp, Artificial Sequence
  Description of Artificial Sequence: Synthetic oligonucleotide
aatcgtggagtagtattccagccta

SEQ ID NO: 2031 - DNA, 25 bp, Artificial Sequence
  Description of Artificial Sequence: Synthetic oligonucleotide
ataatacatcgcaaaatttttccat

SEQ ID NO: 2032 - DNA, 25 bp, Artificial Sequence
  Description of Artificial Sequence: Synthetic oligonucleotide
ttaatcagttccttgttaaacatgt

SEQ ID NO: 2033 - DNA, 25 bp, Artificial Sequence
  Description of Artificial Sequence: Synthetic oligonucleotide
tgccccataattaatcagttccttg

SEQ ID NO: 2034 - DNA, 25 bp, Artificial Sequence
  Description of Artificial Sequence: Synthetic oligonucleotide
gtacacatgagtgtaaagatgacac

SEQ ID NO: 2035 - DNA, 25 bp, Artificial Sequence
  Description of Artificial Sequence: Synthetic oligonucleotide
aagatgacactccaggctggtgtgg

SEQ ID NO: 2036 - DNA, 25 bp, Artificial Sequence
  Description of Artificial Sequence: Synthetic oligonucleotide
caaagtacacatgagtgtaaagatg

SEQ ID NO: 2037 - DNA, 25 bp, Artificial Sequence
  Description of Artificial Sequence: Synthetic oligonucleotide
acatgagtgtaaagatgacactcca

SEQ ID NO: 2038 - DNA, 25 bp, Artificial Sequence
  Description of Artificial Sequence: Synthetic oligonucleotide
tacacatgagtgtaaagatgacact

SEQ ID NO: 2039 - DNA, 25 bp, Artificial Sequence
  Description of Artificial Sequence: Synthetic oligonucleotide
taaagatgacactccaggctggtgt

SEQ ID NO: 2040 - DNA, 25 bp, Artificial Sequence
  Description of Artificial Sequence: Synthetic oligonucleotide
ggctggtgtggtggccagcactttg

SEQ ID NO: 2041 - DNA, 25 bp, Artificial Sequence
  Description of Artificial Sequence: Synthetic oligonucleotide
agtgtaaagatgacactccaggctg

SEQ ID NO: 2042 - DNA, 25 bp, Artificial Sequence
  Description of Artificial Sequence: Synthetic oligonucleotide
tgagtgtaaagatgacactccaggc

SEQ ID NO: 2043 - DNA, 25 bp, Artificial Sequence
  Description of Artificial Sequence: Synthetic oligonucleotide
tgtaaagatgacactccaggctggt

SEQ ID NO: 2044 - DNA, 25 bp, Artificial Sequence
  Description of Artificial Sequence: Synthetic oligonucleotide
agatgacactccaggctggtgtggt

SEQ ID NO: 2045 - DNA, 25 bp, Artificial Sequence
  Description of Artificial Sequence: Synthetic oligonucleotide
gtctggggagagcttttacatgcat

SEQ ID NO: 2046 - DNA, 25 bp, Artificial Sequence
  Description of Artificial Sequence: Synthetic oligonucleotide
tctaatttccacctttgtgaaagtc

SEQ ID NO: 2047 - DNA, 25 bp, Artificial Sequence
  Description of Artificial Sequence: Synthetic oligonucleotide
tttccacctttgtgaaagtcccttc

SEQ ID NO: 2048 - DNA, 25 bp, Artificial Sequence
  Description of Artificial Sequence: Synthetic oligonucleotide
tccgaacttccttttagtttcctga

SEQ ID NO: 2049 - DNA, 25 bp, Artificial Sequence
  Description of Artificial Sequence: Synthetic oligonucleotide
gaacttccttttagtttcctgacaa

SEQ ID NO: 2050 - DNA, 25 bp, Artificial Sequence
  Description of Artificial Sequence: Synthetic oligonucleotide
acgtcaagggttgatacagtctggg

SEQ ID NO: 2051 - DNA, 25 bp, Artificial Sequence
  Description of Artificial Sequence: Synthetic oligonucleotide
aagtcccttctgtcccaacgtcaag

SEQ ID NO: 2052 - DNA, 25 bp, Artificial Sequence
  Description of Artificial Sequence: Synthetic oligonucleotide
ggaccctacaggtagtactggctgt

SEQ ID NO: 2053 - DNA, 25 bp, Artificial Sequence
  Description of Artificial Sequence: Synthetic oligonucleotide
gtgaatttgtgatcattgaagacaa

SEQ ID NO: 2054 - DNA, 25 bp, Artificial Sequence
  Description of Artificial Sequence: Synthetic oligonucleotide
tctttctccagaaatgaatcgttgg

SEQ ID NO: 2055 - DNA, 25 bp, Artificial Sequence
  Description of Artificial Sequence: Synthetic oligonucleotide
ttctgtcccaacgtcaagggttgat

SEQ ID NO: 2056 - DNA, 25 bp, Artificial Sequence
  Description of Artificial Sequence: Synthetic oligonucleotide
gacaaaagcatcacctgtctttctc

SEQ ID NO: 2057 - DNA, 25 bp, Artificial Sequence
  Description of Artificial Sequence: Synthetic oligonucleotide
tgtcaagacatcaacagtctctccc

SEQ ID NO: 2058 - DNA, 25 bp, Artificial Sequence
  Description of Artificial Sequence: Synthetic oligonucleotide
tttccacctttgtgaaagtcccttc

SEQ ID NO: 2059 - DNA, 25 bp, Artificial Sequence
  Description of Artificial Sequence: Synthetic oligonucleotide
gaacttccttttagtttcctgacaa

SEQ ID NO: 2060 - DNA, 25 bp, Artificial Sequence
  Description of Artificial Sequence: Synthetic oligonucleotide
gggagagcttttacatgcatttcag

SEQ ID NO: 2061 - DNA, 25 bp, Artificial Sequence
  Description of Artificial Sequence: Synthetic oligonucleotide
ggaccctacaggtagtactggctgt

SEQ ID NO: 2062 - DNA, 25 bp, Artificial Sequence
  Description of Artificial Sequence: Synthetic oligonucleotide
acgtcaagggttgatacagtctggg

SEQ ID NO: 2063 - DNA, 25 bp, Artificial Sequence
  Description of Artificial Sequence: Synthetic oligonucleotide
tttcagcctgaattgatgtcaagac

SEQ ID NO: 2064 - DNA, 25 bp, Artificial Sequence
  Description of Artificial Sequence: Synthetic oligonucleotide
tctttctccagaaatgaatcgttgg

SEQ ID NO: 2065 - DNA, 25 bp, Artificial Sequence
  Description of Artificial Sequence: Synthetic oligonucleotide
ttctgtcccaacgtcaagggttgat

SEQ ID NO: 2066 - DNA, 25 bp, Artificial Sequence
  Description of Artificial Sequence: Synthetic oligonucleotide
tggctgtgcctgtgaatttgtgatc

SEQ ID NO: 2067 - DNA, 25 bp, Artificial Sequence
  Description of Artificial Sequence: Synthetic oligonucleotide
tcgtcttaaccagaagagttctctg

SEQ ID NO: 2068 - DNA, 25 bp, Artificial Sequence
  Description of Artificial Sequence: Synthetic oligonucleotide
tttttttgatacatcgtcttaacca

SEQ ID NO: 2069 - DNA, 25 bp, Artificial Sequence
  Description of Artificial Sequence: Synthetic oligonucleotide
aataatagctctcacggagattttt

SEQ ID NO: 2070 - DNA, 25 bp, Artificial Sequence
  Description of Artificial Sequence: Synthetic oligonucleotide
atcgtcttaaccagaagagttctct

SEQ ID NO: 2071 - DNA, 25 bp, Artificial Sequence
  Description of Artificial Sequence: Synthetic oligonucleotide
taatagctctcacggagattttttt

SEQ ID NO: 2072 - DNA, 25 bp, Artificial Sequence
  Description of Artificial Sequence: Synthetic oligonucleotide
taataatagctctcacggagatttt

SEQ ID NO: 2073 - DNA, 25 bp, Artificial Sequence
  Description of Artificial Sequence: Synthetic oligonucleotide
gatacatcgtcttaaccagaagagt

SEQ ID NO: 2074 - DNA, 25 bp, Artificial Sequence
  Description of Artificial Sequence: Synthetic oligonucleotide
tacatcgtcttaaccagaagagttc

SEQ ID NO: 2075 - DNA, 25 bp, Artificial Sequence
  Description of Artificial Sequence: Synthetic oligonucleotide
ataatagctctcacggagatttttt

SEQ ID NO: 2076 - DNA, 25 bp, Artificial Sequence
  Description of Artificial Sequence: Synthetic oligonucleotide
ttttttgatacatcgtcttaaccag

SEQ ID NO: 2077 - DNA, 25 bp, Artificial Sequence
  Description of Artificial Sequence: Synthetic oligonucleotide
ttttgatacatcgtcttaaccagaa

SEQ ID NO: 2078 - DNA, 25 bp, Artificial Sequence
  Description of Artificial Sequence: Synthetic oligonucleotide
gatagtcatattgtcatattgtctt

SEQ ID NO: 2079 - DNA, 25 bp, Artificial Sequence
  Description of Artificial Sequence: Synthetic oligonucleotide
ctccagtaggagattttagtctgtc

SEQ ID NO: 2080 - DNA, 25 bp, Artificial Sequence
  Description of Artificial Sequence: Synthetic oligonucleotide
atcgtcttaaccagaagagttctct

SEQ ID NO: 2081 - DNA, 25 bp, Artificial Sequence
  Description of Artificial Sequence: Synthetic oligonucleotide
gattttagtctgtcagttcatgtat

SEQ ID NO: 2082 - DNA, 25 bp, Artificial Sequence
  Description of Artificial Sequence: Synthetic oligonucleotide
gaagcttttgctcaagtcctaacat

SEQ ID NO: 2083 - DNA, 25 bp, Artificial Sequence
  Description of Artificial Sequence: Synthetic oligonucleotide
cacttttttctctgtacaataatag

SEQ ID NO: 2084 - DNA, 25 bp, Artificial Sequence
  Description of Artificial Sequence: Synthetic oligonucleotide
tcctttttatgttcacttttttctc

SEQ ID NO: 2085 - DNA, 25 bp, Artificial Sequence
  Description of Artificial Sequence: Synthetic oligonucleotide
gctcaagtcctaacataatctccag

SEQ ID NO: 2086 - DNA, 25 bp, Artificial Sequence
  Description of Artificial Sequence: Synthetic oligonucleotide
ataatagctctcacggagatttttt

SEQ ID NO: 2087 - DNA, 25 bp, Artificial Sequence
  Description of Artificial Sequence: Synthetic oligonucleotide
ggttaataatagctctcacggagat

SEQ ID NO: 2088 - DNA, 25 bp, Artificial Sequence
  Description of Artificial Sequence: Synthetic oligonucleotide
ttttgatacatcgtcttaaccagaa

SEQ ID NO: 2089 - DNA, 25 bp, Artificial Sequence
  Description of Artificial Sequence: Synthetic oligonucleotide
gcaactgtttgaggtagagggaact

SEQ ID NO: 2090 - DNA, 25 bp, Artificial Sequence
  Description of Artificial Sequence: Synthetic oligonucleotide
accaaacacatgtcttctaaattac

SEQ ID NO: 2091 - DNA, 25 bp, Artificial Sequence
  Description of Artificial Sequence: Synthetic oligonucleotide
gaaccaaacacatgtcttctaaatt

SEQ ID NO: 2092 - DNA, 25 bp, Artificial Sequence
  Description of Artificial Sequence: Synthetic oligonucleotide
gatcaagatgtgaaccaaacacatg

SEQ ID NO: 2093 - DNA, 25 bp, Artificial Sequence
  Description of Artificial Sequence: Synthetic oligonucleotide
actggcccaggcttatctgcctgaa

SEQ ID NO: 2094 - DNA, 25 bp, Artificial Sequence
  Description of Artificial Sequence: Synthetic oligonucleotide
tggcccaggcttatctgcctgaaag

SEQ ID NO: 2095 - DNA, 25 bp, Artificial Sequence
  Description of Artificial Sequence: Synthetic oligonucleotide
gcctgaaagggcaactgtttgaggt

SEQ ID NO: 2096 - DNA, 25 bp, Artificial Sequence
  Description of Artificial Sequence: Synthetic oligonucleotide
gatgtgaaccaaacacatgtcttct

SEQ ID NO: 2097 - DNA, 25 bp, Artificial Sequence
  Description of Artificial Sequence: Synthetic oligonucleotide
aggaaatgttggaaaggactttaga

SEQ ID NO: 2098 - DNA, 25 bp, Artificial Sequence
  Description of Artificial Sequence: Synthetic oligonucleotide
tgaaagggcaactgtttgaggtaga

SEQ ID NO: 2099 - DNA, 25 bp, Artificial Sequence
  Description of Artificial Sequence: Synthetic oligonucleotide
tataggaaatgttggaaaggacttt

SEQ ID NO: 2100 - DNA, 25 bp, Artificial Sequence
  Description of Artificial Sequence: Synthetic oligonucleotide
gaagatatgtatctccaggttttca

SEQ ID NO: 2101 - DNA, 25 bp, Artificial Sequence
  Description of Artificial Sequence: Synthetic oligonucleotide
actggaattgccgtgagtccgttgc

SEQ ID NO: 2102 - DNA, 25 bp, Artificial Sequence
  Description of Artificial Sequence: Synthetic oligonucleotide
ttcctttttctcatgaaatggtatt

SEQ ID NO: 2103 - DNA, 25 bp, Artificial Sequence
  Description of Artificial Sequence: Synthetic oligonucleotide
aggaggaggtttatccgagctacgt

SEQ ID NO: 2104 - DNA, 25 bp, Artificial Sequence
  Description of Artificial Sequence: Synthetic oligonucleotide
taattactggaattgccgtgagtcc

SEQ ID NO: 2105 - DNA, 25 bp, Artificial Sequence
  Description of Artificial Sequence: Synthetic oligonucleotide
tatccgagctacgtgatgggtcaaa

SEQ ID NO: 2106 - DNA, 25 bp, Artificial Sequence
  Description of Artificial Sequence: Synthetic oligonucleotide
caggatatggtgttttgtaagtgat

SEQ ID NO: 2107 - DNA, 25 bp, Artificial Sequence
  Description of Artificial Sequence: Synthetic oligonucleotide
gagtccgttgctctgtgaacgtttc

SEQ ID NO: 2108 - DNA, 25 bp, Artificial Sequence
  Description of Artificial Sequence: Synthetic oligonucleotide
gaaatggtattcaaatcgtgcactt

SEQ ID NO: 2109 - DNA, 25 bp, Artificial Sequence
  Description of Artificial Sequence: Synthetic oligonucleotide
ttgtaagtgatttaacagccagctt

SEQ ID NO: 2110 - DNA, 25 bp, Artificial Sequence
  Description of Artificial Sequence: Synthetic oligonucleotide
gctacgtgatgggtcaaatgaactt

SEQ ID NO: 2111 - DNA, 25 bp, Artificial Sequence
  Description of Artificial Sequence: Synthetic oligonucleotide
aatctgttaagtgcatacaactagc

SEQ ID NO: 2112 - DNA, 25 bp, Artificial Sequence
  Description of Artificial Sequence: Synthetic oligonucleotide
acatgcagaatgctgggtcaagccc

SEQ ID NO: 2113 - DNA, 25 bp, Artificial Sequence
  Description of Artificial Sequence: Synthetic oligonucleotide
gcagaatgctgggtcaagccctgta

SEQ ID NO: 2114 - DNA, 25 bp, Artificial Sequence
  Description of Artificial Sequence: Synthetic oligonucleotide
ggctcgcaggaagcactaaggaagt

SEQ ID NO: 2115 - DNA, 25 bp, Artificial Sequence
  Description of Artificial Sequence: Synthetic oligonucleotide
tacaactagcactggctcgcaggaa

SEQ ID NO: 2116 - DNA, 25 bp, Artificial Sequence
  Description of Artificial Sequence: Synthetic oligonucleotide
agcactggctcgcaggaagcactaa

SEQ ID NO: 2117 - DNA, 25 bp, Artificial Sequence
  Description of Artificial Sequence: Synthetic oligonucleotide
tgcatacaactagcactggctcgca

SEQ ID NO: 2118 - DNA, 25 bp, Artificial Sequence
  Description of Artificial Sequence: Synthetic oligonucleotide
ggatgatgatatacctcatcgggtc

SEQ ID NO: 2119 - DNA, 25 bp, Artificial Sequence
  Description of Artificial Sequence: Synthetic oligonucleotide
gtcagtgtgagaattgcgtgagtta

SEQ ID NO: 2120 - DNA, 25 bp, Artificial Sequence
  Description of Artificial Sequence: Synthetic oligonucleotide
ctgggtcaagccctgtaaggctgta

SEQ ID NO: 2121 - DNA, 25 bp, Artificial Sequence
  Description of Artificial Sequence: Synthetic oligonucleotide
gatatacctcatcgggtcagtgtga

SEQ ID NO: 2122 - DNA, 25 bp, Artificial Sequence
  Description of Artificial Sequence: Synthetic oligonucleotide
aattaccctctgtgctacttttatt

SEQ ID NO: 2123 - DNA, 25 bp, Artificial Sequence
  Description of Artificial Sequence: Synthetic oligonucleotide
tactcccaggagctatattacatag

SEQ ID NO: 2124 - DNA, 25 bp, Artificial Sequence
  Description of Artificial Sequence: Synthetic oligonucleotide
ttccattagacattactcccaggag

SEQ ID NO: 2125 - DNA, 25 bp, Artificial Sequence
  Description of Artificial Sequence: Synthetic oligonucleotide
tcccaggagctatattacatagtaa

SEQ ID NO: 2126 - DNA, 25 bp, Artificial Sequence
  Description of Artificial Sequence: Synthetic oligonucleotide
aataggaactttgaattaccctctg

SEQ ID NO: 2127 - DNA, 25 bp, Artificial Sequence
  Description of Artificial Sequence: Synthetic oligonucleotide
gaactttgaattaccctctgtgcta

SEQ ID NO: 2128 - DNA, 25 bp, Artificial Sequence
  Description of Artificial Sequence: Synthetic oligonucleotide
gcttggatgtaaaacgtaatagaaa

SEQ ID NO: 2129 - DNA, 25 bp, Artificial Sequence
  Description of Artificial Sequence: Synthetic oligonucleotide
gaacttgacagctagcagaattggt

SEQ ID NO: 2130 - DNA, 25 bp, Artificial Sequence
  Description of Artificial Sequence: Synthetic oligonucleotide
aaaagggagagctaggaaatggact

SEQ ID NO: 2131 - DNA, 25 bp, Artificial Sequence
  Description of Artificial Sequence: Synthetic oligonucleotide
ggtttccattagacattactcccag

SEQ ID NO: 2132 - DNA, 25 bp, Artificial Sequence
  Description of Artificial Sequence: Synthetic oligonucleotide
gcagaattggtttccattagacatt

SEQ ID NO: 2133 - DNA, 25 bp, Artificial Sequence
  Description of Artificial Sequence: Synthetic oligonucleotide
aattaccctctgtgctacttttatt

SEQ ID NO: 2134 - DNA, 25 bp, Artificial Sequence
  Description of Artificial Sequence: Synthetic oligonucleotide
ttatacatcctacatgacccattca

SEQ ID NO: 2135 - DNA, 25 bp, Artificial Sequence
  Description of Artificial Sequence: Synthetic oligonucleotide
tactcccaggagctatattacatag

SEQ ID NO: 2136 - DNA, 25 bp, Artificial Sequence
  Description of Artificial Sequence: Synthetic oligonucleotide
acaaagctgttttactactaactta

SEQ ID NO: 2137 - DNA, 25 bp, Artificial Sequence
  Description of Artificial Sequence: Synthetic oligonucleotide
aataggaactttgaattaccctctg

SEQ ID NO: 2138 - DNA, 25 bp, Artificial Sequence
  Description of Artificial Sequence: Synthetic oligonucleotide
gaactttgaattaccctctgtgcta

SEQ ID NO: 2139 - DNA, 25 bp, Artificial Sequence
  Description of Artificial Sequence: Synthetic oligonucleotide
gaacttgacagctagcagaattggt

SEQ ID NO: 2140 - DNA, 25 bp, Artificial Sequence
  Description of Artificial Sequence: Synthetic oligonucleotide
tagtctttggtgcttggatgtaaaa

SEQ ID NO: 2141 - DNA, 25 bp, Artificial Sequence
  Description of Artificial Sequence: Synthetic oligonucleotide
aaaagggagagctaggaaatggact

SEQ ID NO: 2142 - DNA, 25 bp, Artificial Sequence
  Description of Artificial Sequence: Synthetic oligonucleotide
ggtttccattagacattactcccag

SEQ ID NO: 2143 - DNA, 25 bp, Artificial Sequence
  Description of Artificial Sequence: Synthetic oligonucleotide
gcagaattggtttccattagacatt

SEQ ID NO: 2144 - DNA, 25 bp, Artificial Sequence
  Description of Artificial Sequence: Synthetic oligonucleotide
ccagggaagggtgagttctattgtc

SEQ ID NO: 2145 - DNA, 25 bp, Artificial Sequence
  Description of Artificial Sequence: Synthetic oligonucleotide
ccagagttcccaaactatactttaa

SEQ ID NO: 2146 - DNA, 25 bp, Artificial Sequence
  Description of Artificial Sequence: Synthetic oligonucleotide
gaaggtggtccattccattcctcct

SEQ ID NO: 2147 - DNA, 25 bp, Artificial Sequence
  Description of Artificial Sequence: Synthetic oligonucleotide
tcaatctagaaggtggtccattcca

SEQ ID NO: 2148 - DNA, 25 bp, Artificial Sequence
  Description of Artificial Sequence: Synthetic oligonucleotide
gccagagttcccaaactatacttta

SEQ ID NO: 2149 - DNA, 25 bp, Artificial Sequence
  Description of Artificial Sequence: Synthetic oligonucleotide
ggtgagttctattgtcaccactgtt

SEQ ID NO: 2150 - DNA, 25 bp, Artificial Sequence
  Description of Artificial Sequence: Synthetic oligonucleotide
gctgctgctaccttctcaatctaga

SEQ ID NO: 2151 - DNA, 25 bp, Artificial Sequence
  Description of Artificial Sequence: Synthetic oligonucleotide
tgctgctaccttctcaatctagaag

SEQ ID NO: 2152 - DNA, 25 bp, Artificial Sequence
  Description of Artificial Sequence: Synthetic oligonucleotide
tctcaatctagaaggtggtccattc

SEQ ID NO: 2153 - DNA, 25 bp, Artificial Sequence
  Description of Artificial Sequence: Synthetic oligonucleotide
tagaaggtggtccattccattcctc

SEQ ID NO: 2154 - DNA, 25 bp, Artificial Sequence
  Description of Artificial Sequence: Synthetic oligonucleotide
gaagggtgagttctattgtcaccac

SEQ ID NO: 2155 - DNA, 25 bp, Artificial Sequence
  Description of Artificial Sequence: Synthetic oligonucleotide
cattcctccttttccagatgagaga

SEQ ID NO: 2156 - DNA, 25 bp, Artificial Sequence
  Description of Artificial Sequence: Synthetic oligonucleotide
ccagggaagggtgagttctattgtc

SEQ ID NO: 2157 - DNA, 25 bp, Artificial Sequence
  Description of Artificial Sequence: Synthetic oligonucleotide
tcaatctagaaggtggtccattcca

SEQ ID NO: 2158 - DNA, 25 bp, Artificial Sequence
  Description of Artificial Sequence: Synthetic oligonucleotide
gccagagttcccaaactatacttta

SEQ ID NO: 2159 - DNA, 25 bp, Artificial Sequence
  Description of Artificial Sequence: Synthetic oligonucleotide
ggtgagttctattgtcaccactgtt

SEQ ID NO: 2160 - DNA, 25 bp, Artificial Sequence
  Description of Artificial Sequence: Synthetic oligonucleotide
gctgctgctaccttctcaatctaga

SEQ ID NO: 2161 - DNA, 25 bp, Artificial Sequence
  Description of Artificial Sequence: Synthetic oligonucleotide
attccattcctccttttccagatga

SEQ ID NO: 2162 - DNA, 25 bp, Artificial Sequence
  Description of Artificial Sequence: Synthetic oligonucleotide
tgagagatctgaggccagagttccc

SEQ ID NO: 2163 - DNA, 25 bp, Artificial Sequence
  Description of Artificial Sequence: Synthetic oligonucleotide
tattgtcaccactgtttctgctgct

SEQ ID NO: 2164 - DNA, 25 bp, Artificial Sequence
  Description of Artificial Sequence: Synthetic oligonucleotide
tgctgctaccttctcaatctagaag

SEQ ID NO: 2165 - DNA, 25 bp, Artificial Sequence
  Description of Artificial Sequence: Synthetic oligonucleotide
tagaaggtggtccattccattcctc

SEQ ID NO: 2166 - DNA, 25 bp, Artificial Sequence
  Description of Artificial Sequence: Synthetic oligonucleotide
tgtaaattaggcacactgagagatg

SEQ ID NO: 2167 - DNA, 25 bp, Artificial Sequence
  Description of Artificial Sequence: Synthetic oligonucleotide
ccatgcctatgagaaagtttagttt

SEQ ID NO: 2168 - DNA, 25 bp, Artificial Sequence
  Description of Artificial Sequence: Synthetic oligonucleotide
tattttttcctatgtatccatgcct

SEQ ID NO: 2169 - DNA, 25 bp, Artificial Sequence
  Description of Artificial Sequence: Synthetic oligonucleotide
tagtttgtaaattaggcacactgag

SEQ ID NO: 2170 - DNA, 25 bp, Artificial Sequence
  Description of Artificial Sequence: Synthetic oligonucleotide
tttttcctatgtatccatgcctatg

SEQ ID NO: 2171 - DNA, 25 bp, Artificial Sequence
  Description of Artificial Sequence: Synthetic oligonucleotide
ccaaaccctgtatgtactatttatt

SEQ ID NO: 2172 - DNA, 25 bp, Artificial Sequence
  Description of Artificial Sequence: Synthetic oligonucleotide
aattaggcacactgagagatgaaca

SEQ ID NO: 2173 - DNA, 25 bp, Artificial Sequence
  Description of Artificial Sequence: Synthetic oligonucleotide
aaccctgtatgtactatttattttt

SEQ ID NO: 2174 - DNA, 25 bp, Artificial Sequence
  Description of Artificial Sequence: Synthetic oligonucleotide
cctatgtatccatgcctatgagaaa

SEQ ID NO: 2175 - DNA, 25 bp, Artificial Sequence
  Description of Artificial Sequence: Synthetic oligonucleotide
tgtatccatgcctatgagaaagttt

SEQ ID NO: 2176 - DNA, 25 bp, Artificial Sequence
  Description of Artificial Sequence: Synthetic oligonucleotide
atccatgcctatgagaaagtttagt

SEQ ID NO: 2177 - DNA, 25 bp, Artificial Sequence
  Description of Artificial Sequence: Synthetic oligonucleotide
ataagatttaatgtttgggtgatac

SEQ ID NO: 2178 - DNA, 25 bp, Artificial Sequence
  Description of Artificial Sequence: Synthetic oligonucleotide
tccaactgttggacaaaataaagag

SEQ ID NO: 2179 - DNA, 25 bp, Artificial Sequence
  Description of Artificial Sequence: Synthetic oligonucleotide
ttgccaaggcctggaacgctgaaga

SEQ ID NO: 2180 - DNA, 25 bp, Artificial Sequence
  Description of Artificial Sequence: Synthetic oligonucleotide
aagaggggattgtgccagaccttgt

SEQ ID NO: 2181 - DNA, 25 bp, Artificial Sequence
  Description of Artificial Sequence: Synthetic oligonucleotide
gctccaactgttggacaaaataaag

SEQ ID NO: 2182 - DNA, 25 bp, Artificial Sequence
  Description of Artificial Sequence: Synthetic oligonucleotide
caactgttggacaaaataaagaggg

SEQ ID NO: 2183 - DNA, 25 bp, Artificial Sequence
  Description of Artificial Sequence: Synthetic oligonucleotide
tctttccaaaaagcattaagaggtt

SEQ ID NO: 2184 - DNA, 25 bp, Artificial Sequence
  Description of Artificial Sequence: Synthetic oligonucleotide
aagatttaatgtttgggtgatacaa

SEQ ID NO: 2185 - DNA, 25 bp, Artificial Sequence
  Description of Artificial Sequence: Synthetic oligonucleotide
catataagatttaatgtttgggtga

SEQ ID NO: 2186 - DNA, 25 bp, Artificial Sequence
  Description of Artificial Sequence: Synthetic oligonucleotide
aataaagaggggattgtgccagacc

SEQ ID NO: 2187 - DNA, 25 bp, Artificial Sequence
  Description of Artificial Sequence: Synthetic oligonucleotide
taaagaggggattgtgccagacctt

SEQ ID NO: 2188 - DNA, 25 bp, Artificial Sequence
  Description of Artificial Sequence: Synthetic oligonucleotide
gcctggaacgctgaagaataatact

SEQ ID NO: 2189 - DNA, 25 bp, Artificial Sequence
  Description of Artificial Sequence: Synthetic oligonucleotide
ttgccaaggcctggaacgctgaaga

SEQ ID NO: 2190 - DNA, 25 bp, Artificial Sequence
  Description of Artificial Sequence: Synthetic oligonucleotide
ttttgattcgaactttgccaaggcc

SEQ ID NO: 2191 - DNA, 25 bp, Artificial Sequence
  Description of Artificial Sequence: Synthetic oligonucleotide
tgtgccagaccttgtgttttttgat

SEQ ID NO: 2192 - DNA, 25 bp, Artificial Sequence
  Description of Artificial Sequence: Synthetic oligonucleotide
gctccaactgttggacaaaataaag

SEQ ID NO: 2193 - DNA, 25 bp, Artificial Sequence
  Description of Artificial Sequence: Synthetic oligonucleotide
tctttccaaaaagcattaagaggtt

SEQ ID NO: 2194 - DNA, 25 bp, Artificial Sequence
  Description of Artificial Sequence: Synthetic oligonucleotide
ctgtttcctttatcctcttggtaaa

SEQ ID NO: 2195 - DNA, 25 bp, Artificial Sequence
  Description of Artificial Sequence: Synthetic oligonucleotide
ggattgtgccagaccttgtgttttt

SEQ ID NO: 2196 - DNA, 25 bp, Artificial Sequence
  Description of Artificial Sequence: Synthetic oligonucleotide
aagatttaatgtttgggtgatacaa

SEQ ID NO: 2197 - DNA, 25 bp, Artificial Sequence
  Description of Artificial Sequence: Synthetic oligonucleotide
gtgttttttgattcgaactttgcca

SEQ ID NO: 2198 - DNA, 25 bp, Artificial Sequence
  Description of Artificial Sequence: Synthetic oligonucleotide
tgtttgtctgtttcctttatcctct

SEQ ID NO: 2199 - DNA, 25 bp, Artificial Sequence
  Description of Artificial Sequence: Synthetic oligonucleotide
gtcattaacgatcacacatatgtaa

SEQ ID NO: 2200 - DNA, 25 bp, Artificial Sequence
  Description of Artificial Sequence: Synthetic oligonucleotide
ctcgtgtcatgccttaaagaatcat

SEQ ID NO: 2201 - DNA, 25 bp, Artificial Sequence
  Description of Artificial Sequence: Synthetic oligonucleotide
gggatgtcattaacgatcacacata

SEQ ID NO: 2202 - DNA, 25 bp, Artificial Sequence
  Description of Artificial Sequence: Synthetic oligonucleotide
ctatagctgtgagcccctgaagtct

SEQ ID NO: 2203 - DNA, 25 bp, Artificial Sequence
  Description of Artificial Sequence: Synthetic oligonucleotide
gtgagcccctgaagtctggctttca

SEQ ID NO: 2204 - DNA, 25 bp, Artificial Sequence
  Description of Artificial Sequence: Synthetic oligonucleotide
gatcataacatatttctgtgctctc

SEQ ID NO: 2205 - DNA, 25 bp, Artificial Sequence
  Description of Artificial Sequence: Synthetic oligonucleotide
attcacgaccccgaactcgtgtcat

SEQ ID NO: 2206 - DNA, 25 bp, Artificial Sequence
  Description of Artificial Sequence: Synthetic oligonucleotide
agaatcatcatagtcaactctttta

SEQ ID NO: 2207 - DNA, 25 bp, Artificial Sequence
  Description of Artificial Sequence: Synthetic oligonucleotide
ataaatgtattcacgaccccgaact

SEQ ID NO: 2208 - DNA, 25 bp, Artificial Sequence
  Description of Artificial Sequence: Synthetic oligonucleotide
aatataaatgtattcacgaccccga

SEQ ID NO: 2209 - DNA, 25 bp, Artificial Sequence
  Description of Artificial Sequence: Synthetic oligonucleotide
ccgaactcgtgtcatgccttaaaga

SEQ ID NO: 2210 - DNA, 25 bp, Artificial Sequence
  Description of Artificial Sequence: Synthetic oligonucleotide
tctggaggcagagacaggtggatcg

SEQ ID NO: 2211 - DNA, 25 bp, Artificial Sequence
  Description of Artificial Sequence: Synthetic oligonucleotide
ctgggcatgatggtatgtgcttgtg

SEQ ID NO: 2212 - DNA, 25 bp, Artificial Sequence
  Description of Artificial Sequence: Synthetic oligonucleotide
atgatggtatgtgcttgtggtccca

SEQ ID NO: 2213 - DNA, 25 bp, Artificial Sequence
  Description of Artificial Sequence: Synthetic oligonucleotide
gagctgtgattgcacagctatactc

SEQ ID NO: 2214 - DNA, 25 bp, Artificial Sequence
  Description of Artificial Sequence: Synthetic oligonucleotide
agctgtgattgcacagctatactcc

SEQ ID NO: 2215 - DNA, 25 bp, Artificial Sequence
  Description of Artificial Sequence: Synthetic oligonucleotide
gctgtgattgcacagctatactcca

SEQ ID NO: 2216 - DNA, 25 bp, Artificial Sequence
  Description of Artificial Sequence: Synthetic oligonucleotide
tgattgcacagctatactccagcct

SEQ ID NO: 2217 - DNA, 25 bp, Artificial Sequence
  Description of Artificial Sequence: Synthetic oligonucleotide
ctttaatataggaattatgggccag

SEQ ID NO: 2218 - DNA, 25 bp, Artificial Sequence
  Description of Artificial Sequence: Synthetic oligonucleotide
tttaatataggaattatgggccagg

SEQ ID NO: 2219 - DNA, 25 bp, Artificial Sequence
  Description of Artificial Sequence: Synthetic oligonucleotide
aatataggaattatgggccaggtgc

SEQ ID NO: 2220 - DNA, 25 bp, Artificial Sequence
  Description of Artificial Sequence: Synthetic oligonucleotide
atataggaattatgggccaggtgca

SEQ ID NO: 2221 - DNA, 25 bp, Artificial Sequence
  Description of Artificial Sequence: Synthetic oligonucleotide
gaagtttgagactgctgagctctga

SEQ ID NO: 2222 - DNA, 25 bp, Artificial Sequence
  Description of Artificial Sequence: Synthetic oligonucleotide
aagtttgagactgctgagctctgat

SEQ ID NO: 2223 - DNA, 25 bp, Artificial Sequence
  Description of Artificial Sequence: Synthetic oligonucleotide
tttgagactgctgagctctgatcgg

SEQ ID NO: 2224 - DNA, 25 bp, Artificial Sequence
  Description of Artificial Sequence: Synthetic oligonucleotide
ttgagactgctgagctctgatcgga

SEQ ID NO: 2225 - DNA, 25 bp, Artificial Sequence
  Description of Artificial Sequence: Synthetic oligonucleotide
gagactgctgagctctgatcggatc

SEQ ID NO: 2226 - DNA, 25 bp, Artificial Sequence
  Description of Artificial Sequence: Synthetic oligonucleotide
actgctgagctctgatcggatctga

SEQ ID NO: 2227 - DNA, 25 bp, Artificial Sequence
  Description of Artificial Sequence: Synthetic oligonucleotide
ctgagctctgatcggatctgagtga

SEQ ID NO: 2228 - DNA, 25 bp, Artificial Sequence
  Description of Artificial Sequence: Synthetic oligonucleotide
gagctctgatcggatctgagtgagc

SEQ ID NO: 2229 - DNA, 25 bp, Artificial Sequence
  Description of Artificial Sequence: Synthetic oligonucleotide
gctctgatcggatctgagtgagctc

SEQ ID NO: 2230 - DNA, 25 bp, Artificial Sequence
  Description of Artificial Sequence: Synthetic oligonucleotide
ctctgatcggatctgagtgagctct

SEQ ID NO: 2231 - DNA, 25 bp, Artificial Sequence
  Description of Artificial Sequence: Synthetic oligonucleotide
tctgatcggatctgagtgagctctg

SEQ ID NO: 2232 - DNA, 25 bp, Artificial Sequence
  Description of Artificial Sequence: Synthetic oligonucleotide
gaatcacctcaactcgggagccgag

SEQ ID NO: 2233 - DNA, 25 bp, Artificial Sequence
  Description of Artificial Sequence: Synthetic oligonucleotide
acctcaactcgggagccgagatcgc

SEQ ID NO: 2234 - DNA, 25 bp, Artificial Sequence
  Description of Artificial Sequence: Synthetic oligonucleotide
aaatacgtgttttttaggccaggtg

SEQ ID NO: 2235 - DNA, 25 bp, Artificial Sequence
  Description of Artificial Sequence: Synthetic oligonucleotide
atcacctcaactcgggagccgagat

SEQ ID NO: 2236 - DNA, 25 bp, Artificial Sequence
  Description of Artificial Sequence: Synthetic oligonucleotide
ataaatacgtgttttttaggccagg

SEQ ID NO: 2237 - DNA, 25 bp, Artificial Sequence
  Description of Artificial Sequence: Synthetic oligonucleotide
atgagaatcacctcaactcgggagc

SEQ ID NO: 2238 - DNA, 25 bp, Artificial Sequence
  Description of Artificial Sequence: Synthetic oligonucleotide
gcatgagaatcacctcaactcggga

SEQ ID NO: 2239 - DNA, 25 bp, Artificial Sequence
  Description of Artificial Sequence: Synthetic oligonucleotide
gagaatcacctcaactcgggagccg

SEQ ID NO: 2240 - DNA, 25 bp, Artificial Sequence
  Description of Artificial Sequence: Synthetic oligonucleotide
aataaatacgtgttttttaggccag

SEQ ID NO: 2241 - DNA, 25 bp, Artificial Sequence
  Description of Artificial Sequence: Synthetic oligonucleotide
ctcaactcgggagccgagatcgcac

SEQ ID NO: 2242 - DNA, 25 bp, Artificial Sequence
  Description of Artificial Sequence: Synthetic oligonucleotide
aggcatgagaatcacctcaactcgg

SEQ ID NO: 2243 - DNA, 25 bp, Artificial Sequence
  Description of Artificial Sequence: Synthetic oligonucleotide
atatctcgttagaggccagacgcgg

SEQ ID NO: 2244 - DNA, 25 bp, Artificial Sequence
  Description of Artificial Sequence: Synthetic oligonucleotide
aaatatctcgttagaggccagacgc

SEQ ID NO: 2245 - DNA, 25 bp, Artificial Sequence
  Description of Artificial Sequence: Synthetic oligonucleotide
tttagaaatatctcgttagaggcca

SEQ ID NO: 2246 - DNA, 25 bp, Artificial Sequence
  Description of Artificial Sequence: Synthetic oligonucleotide
atctcgttagaggccagacgcggtg

SEQ ID NO: 2247 - DNA, 25 bp, Artificial Sequence
  Description of Artificial Sequence: Synthetic oligonucleotide
acctttagaaatatctcgttagagg

SEQ ID NO: 2248 - DNA, 25 bp, Artificial Sequence
  Description of Artificial Sequence: Synthetic oligonucleotide
ctttagaaatatctcgttagaggcc

SEQ ID NO: 2249 - DNA, 25 bp, Artificial Sequence
  Description of Artificial Sequence: Synthetic oligonucleotide
cctttagaaatatctcgttagaggc

SEQ ID NO: 2250 - DNA, 25 bp, Artificial Sequence
  Description of Artificial Sequence: Synthetic oligonucleotide
tatctcgttagaggccagacgcggt

SEQ ID NO: 2251 - DNA, 25 bp, Artificial Sequence
  Description of Artificial Sequence: Synthetic oligonucleotide
gaaatatctcgttagaggccagacg

SEQ ID NO: 2252 - DNA, 25 bp, Artificial Sequence
  Description of Artificial Sequence: Synthetic oligonucleotide
tagaaatatctcgttagaggccaga

SEQ ID NO: 2253 - DNA, 25 bp, Artificial Sequence
  Description of Artificial Sequence: Synthetic oligonucleotide
aatatctcgttagaggccagacgcg

SEQ ID NO: 2254 - DNA, 25 bp, Artificial Sequence
  Description of Artificial Sequence: Synthetic oligonucleotide
tgacagctagccctcccctgtgatg

SEQ ID NO: 2255 - DNA, 25 bp, Artificial Sequence
  Description of Artificial Sequence: Synthetic oligonucleotide
gatgtctagctgcttaccaacttta

SEQ ID NO: 2256 - DNA, 25 bp, Artificial Sequence
  Description of Artificial Sequence: Synthetic oligonucleotide
aaaactgtagaccttgatcccggca

SEQ ID NO: 2257 - DNA, 25 bp, Artificial Sequence
  Description of Artificial Sequence: Synthetic oligonucleotide
atcgtcacacctaaatgctgtctgg

SEQ ID NO: 2258 - DNA, 25 bp, Artificial Sequence
  Description of Artificial Sequence: Synthetic oligonucleotide
aaccctcacgcaagtctagagccaa

SEQ ID NO: 2259 - DNA, 25 bp, Artificial Sequence
  Description of Artificial Sequence: Synthetic oligonucleotide
cgcaagtctagagccaaaactgtag

SEQ ID NO: 2260 - DNA, 25 bp, Artificial Sequence
  Description of Artificial Sequence: Synthetic oligonucleotide
aatggagagtactcctgaccccagt

SEQ ID NO: 2261 - DNA, 25 bp, Artificial Sequence
  Description of Artificial Sequence: Synthetic oligonucleotide
gtggtggtggatactaatacagttc

SEQ ID NO: 2262 - DNA, 25 bp, Artificial Sequence
  Description of Artificial Sequence: Synthetic oligonucleotide
atacagttctgtacgatgtgaagga

SEQ ID NO: 2263 - DNA, 25 bp, Artificial Sequence
  Description of Artificial Sequence: Synthetic oligonucleotide
ttcttgtctattttaacccgtctgc

SEQ ID NO: 2264 - DNA, 25 bp, Artificial Sequence
  Description of Artificial Sequence: Synthetic oligonucleotide
tctggtcccctgcacaataatggag

SEQ ID NO: 2265 - DNA, 25 bp, Artificial Sequence
  Description of Artificial Sequence: Synthetic oligonucleotide
tatcattaacattaggaccttagaa

SEQ ID NO: 2266 - DNA, 25 bp, Artificial Sequence
  Description of Artificial Sequence: Synthetic oligonucleotide
atggacattgagatactatcattaa

SEQ ID NO: 2267 - DNA, 25 bp, Artificial Sequence
  Description of Artificial Sequence: Synthetic oligonucleotide
gaccttagaattttgggtattgtaa

SEQ ID NO: 2268 - DNA, 25 bp, Artificial Sequence
  Description of Artificial Sequence: Synthetic oligonucleotide
gctaaacatggcttaatcttatttt

SEQ ID NO: 2269 - DNA, 25 bp, Artificial Sequence
  Description of Artificial Sequence: Synthetic oligonucleotide
tgtattactgcttcccattgagtaa

SEQ ID NO: 2270 - DNA, 25 bp, Artificial Sequence
  Description of Artificial Sequence: Synthetic oligonucleotide
gggtattgtaatctaaagtatgtta

SEQ ID NO: 2271 - DNA, 25 bp, Artificial Sequence
  Description of Artificial Sequence: Synthetic oligonucleotide
cttctttcctcaatataggagggaa

SEQ ID NO: 2272 - DNA, 25 bp, Artificial Sequence
  Description of Artificial Sequence: Synthetic oligonucleotide
ctgcttcccattgagtaatcatact

SEQ ID NO: 2273 - DNA, 25 bp, Artificial Sequence
  Description of Artificial Sequence: Synthetic oligonucleotide
ggaaggggtgctccttaaatatata

SEQ ID NO: 2274 - DNA, 25 bp, Artificial Sequence
  Description of Artificial Sequence: Synthetic oligonucleotide
aaacccatgtgttaaaatactcagt

SEQ ID NO: 2275 - DNA, 25 bp, Artificial Sequence
  Description of Artificial Sequence: Synthetic oligonucleotide
aatactcagtgctaaacatggctta

SEQ ID NO: 2276 - DNA, 25 bp, Artificial Sequence
  Description of Artificial Sequence: Synthetic oligonucleotide
atttcccagttagtattatcatatg

SEQ ID NO: 2277 - DNA, 25 bp, Artificial Sequence
  Description of Artificial Sequence: Synthetic oligonucleotide
aaatacaaggccctgataaaattga

SEQ ID NO: 2278 - DNA, 25 bp, Artificial Sequence
  Description of Artificial Sequence: Synthetic oligonucleotide
gtttgtacccgtcacagttttcata

SEQ ID NO: 2279 - DNA, 25 bp, Artificial Sequence
  Description of Artificial Sequence: Synthetic oligonucleotide
catagtgctttcaaatacacctttt

SEQ ID NO: 2280 - DNA, 25 bp, Artificial Sequence
  Description of Artificial Sequence: Synthetic oligonucleotide
ggccctgataaaattgatatctatc

SEQ ID NO: 2281 - DNA, 25 bp, Artificial Sequence
  Description of Artificial Sequence: Synthetic oligonucleotide
tacaaggccctgataaaattgatat

SEQ ID NO: 2282 - DNA, 25 bp, Artificial Sequence
  Description of Artificial Sequence: Synthetic oligonucleotide
attatcatatgtttgtacccgtcac

SEQ ID NO: 2283 - DNA, 25 bp, Artificial Sequence
  Description of Artificial Sequence: Synthetic oligonucleotide
ttcccagttagtattatcatatgtt

SEQ ID NO: 2284 - DNA, 25 bp, Artificial Sequence
  Description of Artificial Sequence: Synthetic oligonucleotide
tttgtacccgtcacagttttcatag

SEQ ID NO: 2285 - DNA, 25 bp, Artificial Sequence
  Description of Artificial Sequence: Synthetic oligonucleotide
catatgtttgtacccgtcacagttt

SEQ ID NO: 2286 - DNA, 25 bp, Artificial Sequence
  Description of Artificial Sequence: Synthetic oligonucleotide
tatcatatgtttgtacccgtcacag

SEQ ID NO: 2287 - DNA, 25 bp, Artificial Sequence
  Description of Artificial Sequence: Synthetic oligonucleotide
tcccgtgccactttttcttaaatta

SEQ ID NO: 2288 - DNA, 25 bp, Artificial Sequence
  Description of Artificial Sequence: Synthetic oligonucleotide
atttcccagttagtattatcatatg

SEQ ID NO: 2289 - DNA, 25 bp, Artificial Sequence
  Description of Artificial Sequence: Synthetic oligonucleotide
gtttgtacccgtcacagttttcata

SEQ ID NO: 2290 - DNA, 25 bp, Artificial Sequence
  Description of Artificial Sequence: Synthetic oligonucleotide
catagtgctttcaaatacacctttt

SEQ ID NO: 2291 - DNA, 25 bp, Artificial Sequence
  Description of Artificial Sequence: Synthetic oligonucleotide
ggccctgataaaattgatatctatc

SEQ ID NO: 2292 - DNA, 25 bp, Artificial Sequence
  Description of Artificial Sequence: Synthetic oligonucleotide
tacaaggccctgataaaattgatat

SEQ ID NO: 2293 - DNA, 25 bp, Artificial Sequence
  Description of Artificial Sequence: Synthetic oligonucleotide
attatcatatgtttgtacccgtcac

SEQ ID NO: 2294 - DNA, 25 bp, Artificial Sequence
  Description of Artificial Sequence: Synthetic oligonucleotide
ttgaggttaaacatctctctctctt

SEQ ID NO: 2295 - DNA, 25 bp, Artificial Sequence
  Description of Artificial Sequence: Synthetic oligonucleotide
gtgctttcaaatacacctttttgat

SEQ ID NO: 2296 - DNA, 25 bp, Artificial Sequence
  Description of Artificial Sequence: Synthetic oligonucleotide
aagttttcagaaaatcttgaggtta

SEQ ID NO: 2297 - DNA, 25 bp, Artificial Sequence
  Description of Artificial Sequence: Synthetic oligonucleotide
catatgtttgtacccgtcacagttt

SEQ ID NO: 2298 - DNA, 25 bp, Artificial Sequence
  Description of Artificial Sequence: Synthetic oligonucleotide
aatctgatcgttctttctagctaat

SEQ ID NO: 2299 - DNA, 25 bp, Artificial Sequence
  Description of Artificial Sequence: Synthetic oligonucleotide
agtttgagacctgaatagctcccag

SEQ ID NO: 2300 - DNA, 25 bp, Artificial Sequence
  Description of Artificial Sequence: Synthetic oligonucleotide
cttagcaatgttatcttggtgtgtt

SEQ ID NO: 2301 - DNA, 25 bp, Artificial Sequence
  Description of Artificial Sequence: Synthetic oligonucleotide
ggttattttctcctgatatagatca

SEQ ID NO: 2302 - DNA, 25 bp, Artificial Sequence
  Description of Artificial Sequence: Synthetic oligonucleotide
tttctcctgatatagatcacataac

SEQ ID NO: 2303 - DNA, 25 bp, Artificial Sequence
  Description of Artificial Sequence: Synthetic oligonucleotide
caccagtcatcagctattcagttgg

SEQ ID NO: 2304 - DNA, 25 bp, Artificial Sequence
  Description of Artificial Sequence: Synthetic oligonucleotide
gtaatctgatcgttctttctagcta

SEQ ID NO: 2305 - DNA, 25 bp, Artificial Sequence
  Description of Artificial Sequence: Synthetic oligonucleotide
attcagttggtaagcttccaggaaa

SEQ ID NO: 2306 - DNA, 25 bp, Artificial Sequence
  Description of Artificial Sequence: Synthetic oligonucleotide
ctcaatttgagtaatctgatcgttc

SEQ ID NO: 2307 - DNA, 25 bp, Artificial Sequence
  Description of Artificial Sequence: Synthetic oligonucleotide
gagacctgaatagctcccagatttc

SEQ ID NO: 2308 - DNA, 25 bp, Artificial Sequence
  Description of Artificial Sequence: Synthetic oligonucleotide
cagtcatcagctattcagttggtaa

SEQ ID NO: 2309 - DNA, 25 bp, Artificial Sequence
  Description of Artificial Sequence: Synthetic oligonucleotide
ttcctgacttacagcaagcgagtta

SEQ ID NO: 2310 - DNA, 25 bp, Artificial Sequence
  Description of Artificial Sequence: Synthetic oligonucleotide
tgacttacagcaagcgagttatcgt

SEQ ID NO: 2311 - DNA, 25 bp, Artificial Sequence
  Description of Artificial Sequence: Synthetic oligonucleotide
tacagcaagcgagttatcgtcttct

SEQ ID NO: 2312 - DNA, 25 bp, Artificial Sequence
  Description of Artificial Sequence: Synthetic oligonucleotide
tttcctgacttacagcaagcgagtt

SEQ ID NO: 2313 - DNA, 25 bp, Artificial Sequence
  Description of Artificial Sequence: Synthetic oligonucleotide
gcaagcgagttatcgtcttctgtat

SEQ ID NO: 2314 - DNA, 25 bp, Artificial Sequence
  Description of Artificial Sequence: Synthetic oligonucleotide
agcgagttatcgtcttctgtatttt

SEQ ID NO: 2315 - DNA, 25 bp, Artificial Sequence
  Description of Artificial Sequence: Synthetic oligonucleotide
tattgcccggctcctagaatttatt

SEQ ID NO: 2316 - DNA, 25 bp, Artificial Sequence
  Description of Artificial Sequence: Synthetic oligonucleotide
tcctgacttacagcaagcgagttat

SEQ ID NO: 2317 - DNA, 25 bp, Artificial Sequence
  Description of Artificial Sequence: Synthetic oligonucleotide
cttacagcaagcgagttatcgtctt

SEQ ID NO: 2318 - DNA, 25 bp, Artificial Sequence
  Description of Artificial Sequence: Synthetic oligonucleotide
cgagttatcgtcttctgtattttgt

SEQ ID NO: 2319 - DNA, 25 bp, Artificial Sequence
  Description of Artificial Sequence: Synthetic oligonucleotide
gcgagttatcgtcttctgtattttg

SEQ ID NO: 2320 - DNA, 25 bp, Artificial Sequence
  Description of Artificial Sequence: Synthetic oligonucleotide
tgacttacagcaagcgagttatcgt

SEQ ID NO: 2321 - DNA, 25 bp, Artificial Sequence
  Description of Artificial Sequence: Synthetic oligonucleotide
tacagcaagcgagttatcgtcttct

SEQ ID NO: 2322 - DNA, 25 bp, Artificial Sequence
  Description of Artificial Sequence: Synthetic oligonucleotide
tttcctgacttacagcaagcgagtt

SEQ ID NO: 2323 - DNA, 25 bp, Artificial Sequence
  Description of Artificial Sequence: Synthetic oligonucleotide
gcaagcgagttatcgtcttctgtat

SEQ ID NO: 2324 - DNA, 25 bp, Artificial Sequence
  Description of Artificial Sequence: Synthetic oligonucleotide
agcgagttatcgtcttctgtatttt

SEQ ID NO: 2325 - DNA, 25 bp, Artificial Sequence
  Description of Artificial Sequence: Synthetic oligonucleotide
tattgcccggctcctagaatttatt

SEQ ID NO: 2326 - DNA, 25 bp, Artificial Sequence
  Description of Artificial Sequence: Synthetic oligonucleotide
tgcccggctcctagaatttatttat

SEQ ID NO: 2327 - DNA, 25 bp, Artificial Sequence
  Description of Artificial Sequence: Synthetic oligonucleotide
tcttctgtattttgtagactttcta

SEQ ID NO: 2328 - DNA, 25 bp, Artificial Sequence
  Description of Artificial Sequence: Synthetic oligonucleotide
tcctgacttacagcaagcgagttat

SEQ ID NO: 2329 - DNA, 25 bp, Artificial Sequence
  Description of Artificial Sequence: Synthetic oligonucleotide
cgagttatcgtcttctgtattttgt

SEQ ID NO: 2330 - DNA, 25 bp, Artificial Sequence
  Description of Artificial Sequence: Synthetic oligonucleotide
tctgtattttgtagactttctaaat

SEQ ID NO: 2331 - DNA, 25 bp, Artificial Sequence
  Description of Artificial Sequence: Synthetic oligonucleotide
tttctccaaagacattggacacttg

SEQ ID NO: 2332 - DNA, 25 bp, Artificial Sequence
  Description of Artificial Sequence: Synthetic oligonucleotide
tctccaaagacattggacacttgga

SEQ ID NO: 2333 - DNA, 25 bp, Artificial Sequence
  Description of Artificial Sequence: Synthetic oligonucleotide
caaagacattggacacttggatgat

SEQ ID NO: 2334 - DNA, 25 bp, Artificial Sequence
  Description of Artificial Sequence: Synthetic oligonucleotide
agacattggacacttggatgatttg

SEQ ID NO: 2335 - DNA, 25 bp, Artificial Sequence
  Description of Artificial Sequence: Synthetic oligonucleotide
tggatgatttgctgccgctgacgtt

SEQ ID NO: 2336 - DNA, 25 bp, Artificial Sequence
  Description of Artificial Sequence: Synthetic oligonucleotide
ggatgatttgctgccgctgacgttt

SEQ ID NO: 2337 - DNA, 25 bp, Artificial Sequence
  Description of Artificial Sequence: Synthetic oligonucleotide
atttgctgccgctgacgtttttaga

SEQ ID NO: 2338 - DNA, 25 bp, Artificial Sequence
  Description of Artificial Sequence: Synthetic oligonucleotide
gctgccgctgacgtttttagatttc

SEQ ID NO: 2339 - DNA, 25 bp, Artificial Sequence
  Description of Artificial Sequence: Synthetic oligonucleotide
gccgctgacgtttttagatttcatc

SEQ ID NO: 2340 - DNA, 25 bp, Artificial Sequence
  Description of Artificial Sequence: Synthetic oligonucleotide
cgctgacgtttttagatttcatcca

SEQ ID NO: 2341 - DNA, 25 bp, Artificial Sequence
  Description of Artificial Sequence: Synthetic oligonucleotide
gctgacgtttttagatttcatccag

SEQ ID NO: 2342 - DNA, 25 bp, Artificial Sequence
  Description of Artificial Sequence: Synthetic oligonucleotide
tgcatgtgtgcccatacatgcttat

SEQ ID NO: 2343 - DNA, 25 bp, Artificial Sequence
  Description of Artificial Sequence: Synthetic oligonucleotide
atgtgtgcccatacatgcttatgag

SEQ ID NO: 2344 - DNA, 25 bp, Artificial Sequence
  Description of Artificial Sequence: Synthetic oligonucleotide
aatactgtaaacaatacctttgata

SEQ ID NO: 2345 - DNA, 25 bp, Artificial Sequence
  Description of Artificial Sequence: Synthetic oligonucleotide
gcccatacatgcttatgaggaggtc

SEQ ID NO: 2346 - DNA, 25 bp, Artificial Sequence
  Description of Artificial Sequence: Synthetic oligonucleotide
atacatgcttatgaggaggtcagtg

SEQ ID NO: 2347 - DNA, 25 bp, Artificial Sequence
  Description of Artificial Sequence: Synthetic oligonucleotide
gaggggaatcaggaagtctcttttt

SEQ ID NO: 2348 - DNA, 25 bp, Artificial Sequence
  Description of Artificial Sequence: Synthetic oligonucleotide
gggcagaccacctgaactcaggaat

SEQ ID NO: 2349 - DNA, 25 bp, Artificial Sequence
  Description of Artificial Sequence: Synthetic oligonucleotide
aaaatatctctcaaatactgtaaac

SEQ ID NO: 2350 - DNA, 25 bp, Artificial Sequence
  Description of Artificial Sequence: Synthetic oligonucleotide
taaacaatacctttgatacttttta

SEQ ID NO: 2351 - DNA, 25 bp, Artificial Sequence
  Description of Artificial Sequence: Synthetic oligonucleotide
ctgtaaacaatacctttgatacttt

SEQ ID NO: 2352 - DNA, 25 bp, Artificial Sequence
  Description of Artificial Sequence: Synthetic oligonucleotide
aaatatctctcaaatactgtaaaca

SEQ ID NO: 2353 - DNA, 25 bp, Artificial Sequence
  Description of Artificial Sequence: Synthetic oligonucleotide
atgtgtgcccatacatgcttatgag

SEQ ID NO: 2354 - DNA, 25 bp, Artificial Sequence
  Description of Artificial Sequence: Synthetic oligonucleotide
caagtaaaacttaaccttggcttca

SEQ ID NO: 2355 - DNA, 25 bp, Artificial Sequence
  Description of Artificial Sequence: Synthetic oligonucleotide
atacatgcttatgaggaggtcagtg

SEQ ID NO: 2356 - DNA, 25 bp, Artificial Sequence
  Description of Artificial Sequence: Synthetic oligonucleotide
gggaatcaggaagtctcttttttat

SEQ ID NO: 2357 - DNA, 25 bp, Artificial Sequence
  Description of Artificial Sequence: Synthetic oligonucleotide
gaaagagattatggccaggcgtagt

SEQ ID NO: 2358 - DNA, 25 bp, Artificial Sequence
  Description of Artificial Sequence: Synthetic oligonucleotide
gggcagaccacctgaactcaggaat

SEQ ID NO: 2359 - DNA, 25 bp, Artificial Sequence
  Description of Artificial Sequence: Synthetic oligonucleotide
acttaaccttggcttcaaaaatatc

SEQ ID NO: 2360 - DNA, 25 bp, Artificial Sequence
  Description of Artificial Sequence: Synthetic oligonucleotide
gtgcccatacatgcttatgaggagg

SEQ ID NO: 2361 - DNA, 25 bp, Artificial Sequence
  Description of Artificial Sequence: Synthetic oligonucleotide
ctgtaaacaatacctttgatacttt

SEQ ID NO: 2362 - DNA, 25 bp, Artificial Sequence
  Description of Artificial Sequence: Synthetic oligonucleotide
aaatatctctcaaatactgtaaaca

SEQ ID NO: 2363 - DNA, 25 bp, Artificial Sequence
  Description of Artificial Sequence: Synthetic oligonucleotide
ggtcagtgtgcatgtgtgcccatac

SEQ ID NO: 2364 - DNA, 25 bp, Artificial Sequence
  Description of Artificial Sequence: Synthetic oligonucleotide
taaactctcaataacagaagcgtaa

SEQ ID NO: 2365 - DNA, 25 bp, Artificial Sequence
  Description of Artificial Sequence: Synthetic oligonucleotide
aataaactctcaataacagaagcgt

SEQ ID NO: 2366 - DNA, 25 bp, Artificial Sequence
  Description of Artificial Sequence: Synthetic oligonucleotide
aagaacttgtcaatcgcctttggaa

SEQ ID NO: 2367 - DNA, 25 bp, Artificial Sequence
  Description of Artificial Sequence: Synthetic oligonucleotide
tttattatacaccaaaggttaacag

SEQ ID NO: 2368 - DNA, 25 bp, Artificial Sequence
  Description of Artificial Sequence: Synthetic oligonucleotide
gcctttggaaggcaatgaaacactt

SEQ ID NO: 2369 - DNA, 25 bp, Artificial Sequence
  Description of Artificial Sequence: Synthetic oligonucleotide
ttgtcaatcgcctttggaaggcaat

SEQ ID NO: 2370 - DNA, 25 bp, Artificial Sequence
  Description of Artificial Sequence: Synthetic oligonucleotide
agaacttgtcaatcgcctttggaag

SEQ ID NO: 2371 - DNA, 25 bp, Artificial Sequence
  Description of Artificial Sequence: Synthetic oligonucleotide
gaaggcaatgaaacacttaataaac

SEQ ID NO: 2372 - DNA, 25 bp, Artificial Sequence
  Description of Artificial Sequence: Synthetic oligonucleotide
gtgtgtatattacttgtgtcacaaa

SEQ ID NO: 2373 - DNA, 25 bp, Artificial Sequence
  Description of Artificial Sequence: Synthetic oligonucleotide
attatacaccaaaggttaacagtga

SEQ ID NO: 2374 - DNA, 25 bp, Artificial Sequence
  Description of Artificial Sequence: Synthetic oligonucleotide
ttttctttttgcctatctgcatctt

SEQ ID NO: 2375 - DNA, 25 bp, Artificial Sequence
  Description of Artificial Sequence: Synthetic oligonucleotide
taaactctcaataacagaagcgtaa

SEQ ID NO: 2376 - DNA, 25 bp, Artificial Sequence
  Description of Artificial Sequence: Synthetic oligonucleotide
atcttctcacttgccaaaaaatgaa

SEQ ID NO: 2377 - DNA, 25 bp, Artificial Sequence
  Description of Artificial Sequence: Synthetic oligonucleotide
aaaaatgaaatgtaaacctccaatt

SEQ ID NO: 2378 - DNA, 25 bp, Artificial Sequence
  Description of Artificial Sequence: Synthetic oligonucleotide
gcctttggaaggcaatgaaacactt

SEQ ID NO: 2379 - DNA, 25 bp, Artificial Sequence
  Description of Artificial Sequence: Synthetic oligonucleotide
aagtgtctgattttattatacacca

SEQ ID NO: 2380 - DNA, 25 bp, Artificial Sequence
  Description of Artificial Sequence: Synthetic oligonucleotide
ttgtcaatcgcctttggaaggcaat

SEQ ID NO: 2381 - DNA, 25 bp, Artificial Sequence
  Description of Artificial Sequence: Synthetic oligonucleotide
agaacttgtcaatcgcctttggaag

SEQ ID NO: 2382 - DNA, 25 bp, Artificial Sequence
  Description of Artificial Sequence: Synthetic oligonucleotide
gtgtgtatattacttgtgtcacaaa

SEQ ID NO: 2383 - DNA, 25 bp, Artificial Sequence
  Description of Artificial Sequence: Synthetic oligonucleotide
gttaacagtgaatctctgtgtgatc

SEQ ID NO: 2384 - DNA, 25 bp, Artificial Sequence
  Description of Artificial Sequence: Synthetic oligonucleotide
attatacaccaaaggttaacagtga

SEQ ID NO: 2385 - DNA, 25 bp, Artificial Sequence
  Description of Artificial Sequence: Synthetic oligonucleotide
gcaccgacaatctttgattactgaa

SEQ ID NO: 2386 - DNA, 25 bp, Artificial Sequence
  Description of Artificial Sequence: Synthetic oligonucleotide
agtggcagaggtagccccctaaatg

SEQ ID NO: 2387 - DNA, 25 bp, Artificial Sequence
  Description of Artificial Sequence: Synthetic oligonucleotide
gagaaagcaccgacaatctttgatt

SEQ ID NO: 2388 - DNA, 25 bp, Artificial Sequence
  Description of Artificial Sequence: Synthetic oligonucleotide
ctgacttctccaggacctagtcggg

SEQ ID NO: 2389 - DNA, 25 bp, Artificial Sequence
  Description of Artificial Sequence: Synthetic oligonucleotide
ccgtctgaccaagggctgacttctc

SEQ ID NO: 2390 - DNA, 25 bp, Artificial Sequence
  Description of Artificial Sequence: Synthetic oligonucleotide
ggctgacttctccaggacctagtcg

SEQ ID NO: 2391 - DNA, 25 bp, Artificial Sequence
  Description of Artificial Sequence: Synthetic oligonucleotide
gcaaggagaaagcaccgacaatctt

SEQ ID NO: 2392 - DNA, 25 bp, Artificial Sequence
  Description of Artificial Sequence: Synthetic oligonucleotide
gagcagtggcagaggtagcccccta

SEQ ID NO: 2393 - DNA, 25 bp, Artificial Sequence
  Description of Artificial Sequence: Synthetic oligonucleotide
atccccgtctgaccaagggctgact

SEQ ID NO: 2394 - DNA, 25 bp, Artificial Sequence
  Description of Artificial Sequence: Synthetic oligonucleotide
gacaatctttgattactgaaagtat

SEQ ID NO: 2395 - DNA, 25 bp, Artificial Sequence
  Description of Artificial Sequence: Synthetic oligonucleotide
gggcaaggagaaagcaccgacaatc

SEQ ID NO: 2396 - DNA, 25 bp, Artificial Sequence
  Description of Artificial Sequence: Synthetic oligonucleotide
gtagacagtaaaagaacttgtcaat

SEQ ID NO: 2397 - DNA, 25 bp, Artificial Sequence
  Description of Artificial Sequence: Synthetic oligonucleotide
ttttccaagttgatctatccagtga

SEQ ID NO: 2398 - DNA, 25 bp, Artificial Sequence
  Description of Artificial Sequence: Synthetic oligonucleotide
caccgatatattgttaccgctgaaa

SEQ ID NO: 2399 - DNA, 25 bp, Artificial Sequence
  Description of Artificial Sequence: Synthetic oligonucleotide
tattgctgtagtaagagaagctctt

SEQ ID NO: 2400 - DNA, 25 bp, Artificial Sequence
  Description of Artificial Sequence: Synthetic oligonucleotide
gttgatctatccagtgacgtggcct

SEQ ID NO: 2401 - DNA, 25 bp, Artificial Sequence
  Description of Artificial Sequence: Synthetic oligonucleotide
aaagattaaattgctattgctgtag

SEQ ID NO: 2402 - DNA, 25 bp, Artificial Sequence
  Description of Artificial Sequence: Synthetic oligonucleotide
gggaaggatttaacaccgatatatt

SEQ ID NO: 2403 - DNA, 25 bp, Artificial Sequence
  Description of Artificial Sequence: Synthetic oligonucleotide
gggcatgggaaggatttaacaccga

SEQ ID NO: 2404 - DNA, 25 bp, Artificial Sequence
  Description of Artificial Sequence: Synthetic oligonucleotide
tattgttaccgctgaaaatgaactt

SEQ ID NO: 2405 - DNA, 25 bp, Artificial Sequence
  Description of Artificial Sequence: Synthetic oligonucleotide
acgtggcctggtgggcgtttcttct

SEQ ID NO: 2406 - DNA, 25 bp, Artificial Sequence
  Description of Artificial Sequence: Synthetic oligonucleotide
ttcttcttgtacttatgtggttttt

SEQ ID NO: 2407 - DNA, 25 bp, Artificial Sequence
  Description of Artificial Sequence: Synthetic oligonucleotide
atgaactttatgaaccttttccaag

SEQ ID NO: 2408 - DNA, 25 bp, Artificial Sequence
  Description of Artificial Sequence: Synthetic oligonucleotide
tcctctcagtgcagtagatgcggaa

SEQ ID NO: 2409 - DNA, 25 bp, Artificial Sequence
  Description of Artificial Sequence: Synthetic oligonucleotide
gatgcggaagttagcagacacttgt

SEQ ID NO: 2410 - DNA, 25 bp, Artificial Sequence
  Description of Artificial Sequence: Synthetic oligonucleotide
gttagcagacacttgttcgaactgt

SEQ ID NO: 2411 - DNA, 25 bp, Artificial Sequence
  Description of Artificial Sequence: Synthetic oligonucleotide
cacttgttcgaactgtgtatttgtc

SEQ ID NO: 2412 - DNA, 25 bp, Artificial Sequence
  Description of Artificial Sequence: Synthetic oligonucleotide
ttttagtgactcatcagttgcagta

SEQ ID NO: 2413 - DNA, 25 bp, Artificial Sequence
  Description of Artificial Sequence: Synthetic oligonucleotide
gtgactcatcagttgcagtacctca

SEQ ID NO: 2414 - DNA, 25 bp, Artificial Sequence
  Description of Artificial Sequence: Synthetic oligonucleotide
gtacctcaaagctgcaagtcagatt

SEQ ID NO: 2415 - DNA, 25 bp, Artificial Sequence
  Description of Artificial Sequence: Synthetic oligonucleotide
ctggtatagattttggctccctttt

SEQ ID NO: 2416 - DNA, 25 bp, Artificial Sequence
  Description of Artificial Sequence: Synthetic oligonucleotide
tagattttggctcccttttaaagaa

SEQ ID NO: 2417 - DNA, 25 bp, Artificial Sequence
  Description of Artificial Sequence: Synthetic oligonucleotide
aaagtgaacaacctccagttccagg

SEQ ID NO: 2418 - DNA, 25 bp, Artificial Sequence
  Description of Artificial Sequence: Synthetic oligonucleotide
ctaaggaatcgtaccttctcagagt

SEQ ID NO: 2419 - DNA, 25 bp, Artificial Sequence
  Description of Artificial Sequence: Synthetic oligonucleotide
gagtgatttaattgtgggatcctcc

SEQ ID NO: 2420 - DNA, 25 bp, Artificial Sequence
  Description of Artificial Sequence: Synthetic oligonucleotide
tgatttaattgtgggatcctcctga

SEQ ID NO: 2421 - DNA, 25 bp, Artificial Sequence
  Description of Artificial Sequence: Synthetic oligonucleotide
gtaattttattatgacctccttcac

SEQ ID NO: 2422 - DNA, 25 bp, Artificial Sequence
  Description of Artificial Sequence: Synthetic oligonucleotide
gacctccttcacagtggttttcagg

SEQ ID NO: 2423 - DNA, 25 bp, Artificial Sequence
  Description of Artificial Sequence: Synthetic oligonucleotide
gttttcaggtaaccctgctttctta

SEQ ID NO: 2424 - DNA, 25 bp, Artificial Sequence
  Description of Artificial Sequence: Synthetic oligonucleotide
tttcaggtaaccctgctttcttagt

SEQ ID NO: 2425 - DNA, 25 bp, Artificial Sequence
  Description of Artificial Sequence: Synthetic oligonucleotide
gaggttctgtgacccaggtaacctt

SEQ ID NO: 2426 - DNA, 25 bp, Artificial Sequence
  Description of Artificial Sequence: Synthetic oligonucleotide
ccaggtaaccttgatgcacagatga

SEQ ID NO: 2427 - DNA, 25 bp, Artificial Sequence
  Description of Artificial Sequence: Synthetic oligonucleotide
ggtaaccttgatgcacagatgagat

SEQ ID NO: 2428 - DNA, 25 bp, Artificial Sequence
  Description of Artificial Sequence: Synthetic oligonucleotide
aatcagaggcaatcctttcataagt

SEQ ID NO: 2429 - DNA, 25 bp, Artificial Sequence
  Description of Artificial Sequence: Synthetic oligonucleotide
cagaggcaatcctttcataagtaga

SEQ ID NO: 2430 - DNA, 25 bp, Artificial Sequence
  Description of Artificial Sequence: Synthetic oligonucleotide
gcaaaatcagatgtcagcataagcg

SEQ ID NO: 2431 - DNA, 25 bp, Artificial Sequence
  Description of Artificial Sequence: Synthetic oligonucleotide
gaattgaatatatgctacttcaaga

SEQ ID NO: 2432 - DNA, 25 bp, Artificial Sequence
  Description of Artificial Sequence: Synthetic oligonucleotide
taaaccaaaccctattgaagaattg

SEQ ID NO: 2433 - DNA, 25 bp, Artificial Sequence
  Description of Artificial Sequence: Synthetic oligonucleotide
aattttctgctcacgatgagtttag

SEQ ID NO: 2434 - DNA, 25 bp, Artificial Sequence
  Description of Artificial Sequence: Synthetic oligonucleotide
tcagatgtcagcataagcgatggat

SEQ ID NO: 2435 - DNA, 25 bp, Artificial Sequence
  Description of Artificial Sequence: Synthetic oligonucleotide
tctgctcacgatgagtttagtgtgt

SEQ ID NO: 2436 - DNA, 25 bp, Artificial Sequence
  Description of Artificial Sequence: Synthetic oligonucleotide
gcataagcgatggataatacctaat

SEQ ID NO: 2437 - DNA, 25 bp, Artificial Sequence
  Description of Artificial Sequence: Synthetic oligonucleotide
aattgatctcgtagaattatcttaa

SEQ ID NO: 2438 - DNA, 25 bp, Artificial Sequence
  Description of Artificial Sequence: Synthetic oligonucleotide
caagaaactaaattgatctcgtaga

SEQ ID NO: 2439 - DNA, 25 bp, Artificial Sequence
  Description of Artificial Sequence: Synthetic oligonucleotide
gagacatctgactttgatagctaaa

SEQ ID NO: 2440 - DNA, 25 bp, Artificial Sequence
  Description of Artificial Sequence: Synthetic oligonucleotide
gaataaattttctgctcacgatgag

SEQ ID NO: 2441 - DNA, 25 bp, Artificial Sequence
  Description of Artificial Sequence: Synthetic oligonucleotide
taaaccaaaccctattgaagaattg

SEQ ID NO: 2442 - DNA, 25 bp, Artificial Sequence
  Description of Artificial Sequence: Synthetic oligonucleotide
tcagatgtcagcataagcgatggat

SEQ ID NO: 2443 - DNA, 25 bp, Artificial Sequence
  Description of Artificial Sequence: Synthetic oligonucleotide
tctgctcacgatgagtttagtgtgt

SEQ ID NO: 2444 - DNA, 25 bp, Artificial Sequence
  Description of Artificial Sequence: Synthetic oligonucleotide
gcataagcgatggataatacctaat

SEQ ID NO: 2445 - DNA, 25 bp, Artificial Sequence
  Description of Artificial Sequence: Synthetic oligonucleotide
ggctataatttctctgcaaaatcag

SEQ ID NO: 2446 - DNA, 25 bp, Artificial Sequence
  Description of Artificial Sequence: Synthetic oligonucleotide
agatgtttcagcttgaagaaccaaa

SEQ ID NO: 2447 - DNA, 25 bp, Artificial Sequence
  Description of Artificial Sequence: Synthetic oligonucleotide
aattgatctcgtagaattatcttaa

SEQ ID NO: 2448 - DNA, 25 bp, Artificial Sequence
  Description of Artificial Sequence: Synthetic oligonucleotide
actgccctcagtaaatccatggtta

SEQ ID NO: 2449 - DNA, 25 bp, Artificial Sequence
  Description of Artificial Sequence: Synthetic oligonucleotide
gagacatctgactttgatagctaaa

SEQ ID NO: 2450 - DNA, 25 bp, Artificial Sequence
  Description of Artificial Sequence: Synthetic oligonucleotide
aatacctaataaactgccctcagta

SEQ ID NO: 2451 - DNA, 25 bp, Artificial Sequence
  Description of Artificial Sequence: Synthetic oligonucleotide
gaataaattttctgctcacgatgag

SEQ ID NO: 2452 - DNA, 25 bp, Artificial Sequence
  Description of Artificial Sequence: Synthetic oligonucleotide
ctgtgttttccaggagttacgtcaa

SEQ ID NO: 2453 - DNA, 25 bp, Artificial Sequence
  Description of Artificial Sequence: Synthetic oligonucleotide
gttttccaggagttacgtcaaacta

SEQ ID NO: 2454 - DNA, 25 bp, Artificial Sequence
  Description of Artificial Sequence: Synthetic oligonucleotide
atacatattttgtgctaatcttgtt

SEQ ID NO: 2455 - DNA, 25 bp, Artificial Sequence
  Description of Artificial Sequence: Synthetic oligonucleotide
gtctagcatgtttgtttaatccttt

SEQ ID NO: 2456 - DNA, 25 bp, Artificial Sequence
  Description of Artificial Sequence: Synthetic oligonucleotide
agtgtttgtctagcatgtttgttta

SEQ ID NO: 2457 - DNA, 25 bp, Artificial Sequence
  Description of Artificial Sequence: Synthetic oligonucleotide
cttgtcctccaagttatgggggatc

SEQ ID NO: 2458 - DNA, 25 bp, Artificial Sequence
  Description of Artificial Sequence: Synthetic oligonucleotide
gttacgtcaaactacctgtactggt

SEQ ID NO: 2459 - DNA, 25 bp, Artificial Sequence
  Description of Artificial Sequence: Synthetic oligonucleotide
aggagttacgtcaaactacctgtac

SEQ ID NO: 2460 - DNA, 25 bp, Artificial Sequence
  Description of Artificial Sequence: Synthetic oligonucleotide
gtactgacaatctgtgttttccagg

SEQ ID NO: 2461 - DNA, 25 bp, Artificial Sequence
  Description of Artificial Sequence: Synthetic oligonucleotide
tcttgtactgacaatctgtgttttc

SEQ ID NO: 2462 - DNA, 25 bp, Artificial Sequence
  Description of Artificial Sequence: Synthetic oligonucleotide
gtcaaactacctgtactggtttaaa

SEQ ID NO: 2463 - DNA, 25 bp, Artificial Sequence
  Description of Artificial Sequence: Synthetic oligonucleotide
ggaaatgaccaggccaagactcaag

SEQ ID NO: 2464 - DNA, 25 bp, Artificial Sequence
  Description of Artificial Sequence: Synthetic oligonucleotide
aggccaagactcaagcctccccagt

SEQ ID NO: 2465 - DNA, 25 bp, Artificial Sequence
  Description of Artificial Sequence: Synthetic oligonucleotide
tatcaaccccctattgtagtaaact

SEQ ID NO: 2466 - DNA, 25 bp, Artificial Sequence
  Description of Artificial Sequence: Synthetic oligonucleotide
cctatcaaccccctattgtagtaaa

SEQ ID NO: 2467 - DNA, 25 bp, Artificial Sequence
  Description of Artificial Sequence: Synthetic oligonucleotide
ggaaccttggaaatgaccaggccaa

SEQ ID NO: 2468 - DNA, 25 bp, Artificial Sequence
  Description of Artificial Sequence: Synthetic oligonucleotide
cctttgtccttaggtgtgaggtcca

SEQ ID NO: 2469 - DNA, 25 bp, Artificial Sequence
  Description of Artificial Sequence: Synthetic oligonucleotide
aatgaccaggccaagactcaagcct

SEQ ID NO: 2470 - DNA, 25 bp, Artificial Sequence
  Description of Artificial Sequence: Synthetic oligonucleotide
caaccccctattgtagtaaacttgg

SEQ ID NO: 2471 - DNA, 25 bp, Artificial Sequence
  Description of Artificial Sequence: Synthetic oligonucleotide
agttctactgacctttgtccttagg

SEQ ID NO: 2472 - DNA, 25 bp, Artificial Sequence
  Description of Artificial Sequence: Synthetic oligonucleotide
tactgacctttgtccttaggtgtga

SEQ ID NO: 2473 - DNA, 25 bp, Artificial Sequence
  Description of Artificial Sequence: Synthetic oligonucleotide
agcacccctatcaaccccctattgt

SEQ ID NO: 2474 - DNA, 25 bp, Artificial Sequence
  Description of Artificial Sequence: Synthetic oligonucleotide
aaacgacagcaacgaaaactcctta

SEQ ID NO: 2475 - DNA, 25 bp, Artificial Sequence
  Description of Artificial Sequence: Synthetic oligonucleotide
gagaacttagtgcaagactacagga

SEQ ID NO: 2476 - DNA, 25 bp, Artificial Sequence
  Description of Artificial Sequence: Synthetic oligonucleotide
tacaggagttaacagatggccagct

SEQ ID NO: 2477 - DNA, 25 bp, Artificial Sequence
  Description of Artificial Sequence: Synthetic oligonucleotide
gacagcaacgaaaactccttaatca

SEQ ID NO: 2478 - DNA, 25 bp, Artificial Sequence
  Description of Artificial Sequence: Synthetic oligonucleotide
caggagaacttagtgcaagactaca

SEQ ID NO: 2479 - DNA, 25 bp, Artificial Sequence
  Description of Artificial Sequence: Synthetic oligonucleotide
agactacaggagttaacagatggcc

SEQ ID NO: 2480 - DNA, 25 bp, Artificial Sequence
  Description of Artificial Sequence: Synthetic oligonucleotide
atatcaaatcctgaagaaataagcc

SEQ ID NO: 2481 - DNA, 25 bp, Artificial Sequence
  Description of Artificial Sequence: Synthetic oligonucleotide
gaaaactccttaatcagaacactga

SEQ ID NO: 2482 - DNA, 25 bp, Artificial Sequence
  Description of Artificial Sequence: Synthetic oligonucleotide
tcagaacactgatccaatgaggaat

SEQ ID NO: 2483 - DNA, 25 bp, Artificial Sequence
  Description of Artificial Sequence: Synthetic oligonucleotide
gagtttatatcaaatcctgaagaaa

SEQ ID NO: 2484 - DNA, 25 bp, Artificial Sequence
  Description of Artificial Sequence: Synthetic oligonucleotide
ttcctccaaaacaaacgacagcaac

SEQ ID NO: 2485 - DNA, 25 bp, Artificial Sequence
  Description of Artificial Sequence: Synthetic oligonucleotide
aggcttcaggcccaactctacagac

SEQ ID NO: 2486 - DNA, 25 bp, Artificial Sequence
  Description of Artificial Sequence: Synthetic oligonucleotide
agaccacactagacaccctacaaag

SEQ ID NO: 2487 - DNA, 25 bp, Artificial Sequence
  Description of Artificial Sequence: Synthetic oligonucleotide
ggcctaccatctgctaacacaggca

SEQ ID NO: 2488 - DNA, 25 bp, Artificial Sequence
  Description of Artificial Sequence: Synthetic oligonucleotide
agacactaatgcactgcctaaaaat

SEQ ID NO: 2489 - DNA, 25 bp, Artificial Sequence
  Description of Artificial Sequence: Synthetic oligonucleotide
atcaagatcaagaacaatcagagaa

SEQ ID NO: 2490 - DNA, 25 bp, Artificial Sequence
  Description of Artificial Sequence: Synthetic oligonucleotide
aaagagttgctggatgactaggaaa

SEQ ID NO: 2491 - DNA, 25 bp, Artificial Sequence
  Description of Artificial Sequence: Synthetic oligonucleotide
gcagacactaatgcactgcctaaaa

SEQ ID NO: 2492 - DNA, 25 bp, Artificial Sequence
  Description of Artificial Sequence: Synthetic oligonucleotide
caggcctaccatctgctaacacagg

SEQ ID NO: 2493 - DNA, 25 bp, Artificial Sequence
  Description of Artificial Sequence: Synthetic oligonucleotide
tgaaaagatccaccccagttgatcc

SEQ ID NO: 2494 - DNA, 25 bp, Artificial Sequence
  Description of Artificial Sequence: Synthetic oligonucleotide
cctacaaagagttgctggatgacta

SEQ ID NO: 2495 - DNA, 25 bp, Artificial Sequence
  Description of Artificial Sequence: Synthetic oligonucleotide
aatgaaaagatccaccccagttgat

SEQ ID NO: 2496 - DNA, 25 bp, Artificial Sequence
  Description of Artificial Sequence: Synthetic oligonucleotide
aggcttcaggcccaactctacagac

SEQ ID NO: 2497 - DNA, 25 bp, Artificial Sequence
  Description of Artificial Sequence: Synthetic oligonucleotide
agcctgcctgaggactttggcaaca

SEQ ID NO: 2498 - DNA, 25 bp, Artificial Sequence
  Description of Artificial Sequence: Synthetic oligonucleotide
agaccacactagacaccctacaaag

SEQ ID NO: 2499 - DNA, 25 bp, Artificial Sequence
  Description of Artificial Sequence: Synthetic oligonucleotide
caggcctaccatctgctaacacagg

SEQ ID NO: 2500 - DNA, 25 bp, Artificial Sequence
  Description of Artificial Sequence: Synthetic oligonucleotide
caccccagttgatccaggcttcagg

SEQ ID NO: 2501 - DNA, 25 bp, Artificial Sequence
  Description of Artificial Sequence: Synthetic oligonucleotide
tggcaacaagttcacctgcagacca

SEQ ID NO: 2502 - DNA, 25 bp, Artificial Sequence
  Description of Artificial Sequence: Synthetic oligonucleotide
gataaagccggtatgcaagaactag

SEQ ID NO: 2503 - DNA, 25 bp, Artificial Sequence
  Description of Artificial Sequence: Synthetic oligonucleotide
gcagacactaatgcactgcctaaaa

SEQ ID NO: 2504 - DNA, 25 bp, Artificial Sequence
  Description of Artificial Sequence: Synthetic oligonucleotide
aggaaacaggcctaccatctgctaa

SEQ ID NO: 2505 - DNA, 25 bp, Artificial Sequence
  Description of Artificial Sequence: Synthetic oligonucleotide
cctacaaagagttgctggatgacta

SEQ ID NO: 2506 - DNA, 25 bp, Artificial Sequence
  Description of Artificial Sequence: Synthetic oligonucleotide
aatgaaaagatccaccccagttgat

SEQ ID NO: 2507 - DNA, 25 bp, Artificial Sequence
  Description of Artificial Sequence: Synthetic oligonucleotide
gaggattgcttcagctggggaggcg

SEQ ID NO: 2508 - DNA, 25 bp, Artificial Sequence
  Description of Artificial Sequence: Synthetic oligonucleotide
gggcgtgctggtgtgcctgtattcc

SEQ ID NO: 2509 - DNA, 25 bp, Artificial Sequence
  Description of Artificial Sequence: Synthetic oligonucleotide
ctgggcgtgctggtgtgcctgtatt

SEQ ID NO: 2510 - DNA, 25 bp, Artificial Sequence
  Description of Artificial Sequence: Synthetic oligonucleotide
gattgcttcagctggggaggcggag

SEQ ID NO: 2511 - DNA, 25 bp, Artificial Sequence
  Description of Artificial Sequence: Synthetic oligonucleotide
cctgctctcccaaaaaaatacaaaa

SEQ ID NO: 2512 - DNA, 25 bp, Artificial Sequence
  Description of Artificial Sequence: Synthetic oligonucleotide
ccctgctctcccaaaaaaatacaaa

SEQ ID NO: 2513 - DNA, 25 bp, Artificial Sequence
  Description of Artificial Sequence: Synthetic oligonucleotide
ttgcttcagctggggaggcggaggc

SEQ ID NO: 2514 - DNA, 25 bp, Artificial Sequence
  Description of Artificial Sequence: Synthetic oligonucleotide
aggattgcttcagctggggaggcgg

SEQ ID NO: 2515 - DNA, 25 bp, Artificial Sequence
  Description of Artificial Sequence: Synthetic oligonucleotide
ggattgcttcagctggggaggcgga

SEQ ID NO: 2516 - DNA, 25 bp, Artificial Sequence
  Description of Artificial Sequence: Synthetic oligonucleotide
ctgcagggagccaagactgagccat

SEQ ID NO: 2517 - DNA, 25 bp, Artificial Sequence
  Description of Artificial Sequence: Synthetic oligonucleotide
gctgcagggagccaagactgagcca

SEQ ID NO: 2518 - DNA, 25 bp, Artificial Sequence
  Description of Artificial Sequence: Synthetic oligonucleotide
atgatcagatcgaagtgtgacccct

SEQ ID NO: 2519 - DNA, 25 bp, Artificial Sequence
  Description of Artificial Sequence: Synthetic oligonucleotide
ggtggagctatgttatgatcagatc

SEQ ID NO: 2520 - DNA, 25 bp, Artificial Sequence
  Description of Artificial Sequence: Synthetic oligonucleotide
ccttctgctgggagaattagcagca

SEQ ID NO: 2521 - DNA, 25 bp, Artificial Sequence
  Description of Artificial Sequence: Synthetic oligonucleotide
ttatgtccttgttcaactcaacttg

SEQ ID NO: 2522 - DNA, 25 bp, Artificial Sequence
  Description of Artificial Sequence: Synthetic oligonucleotide
tagtttccgacagtcatctccttct

SEQ ID NO: 2523 - DNA, 25 bp, Artificial Sequence
  Description of Artificial Sequence: Synthetic oligonucleotide
gtccttgttcaactcaacttgagct

SEQ ID NO: 2524 - DNA, 25 bp, Artificial Sequence
  Description of Artificial Sequence: Synthetic oligonucleotide
gggtacagtacacattccctgcctt

SEQ ID NO: 2525 - DNA, 25 bp, Artificial Sequence
  Description of Artificial Sequence: Synthetic oligonucleotide
agatcgaagtgtgacccctgtgtgg

SEQ ID NO: 2526 - DNA, 25 bp, Artificial Sequence
  Description of Artificial Sequence: Synthetic oligonucleotide
tttattccattatcaccaagcacct

SEQ ID NO: 2527 - DNA, 25 bp, Artificial Sequence
  Description of Artificial Sequence: Synthetic oligonucleotide
aacctttattccattatcaccaagc

SEQ ID NO: 2528 - DNA, 25 bp, Artificial Sequence
  Description of Artificial Sequence: Synthetic oligonucleotide
caacttgagctcttgaactcctcct

SEQ ID NO: 2529 - DNA, 25 bp, Artificial Sequence
  Description of Artificial Sequence: Synthetic oligonucleotide
gcctgatggatcgatgagatctgaa

SEQ ID NO: 2530 - DNA, 25 bp, Artificial Sequence
  Description of Artificial Sequence: Synthetic oligonucleotide
agaacactgtgcgagattgtattcc

SEQ ID NO: 2531 - DNA, 25 bp, Artificial Sequence
  Description of Artificial Sequence: Synthetic oligonucleotide
ccggactcagcgagcagagggtcgt

SEQ ID NO: 2532 - DNA, 25 bp, Artificial Sequence
  Description of Artificial Sequence: Synthetic oligonucleotide
cagctggccctgaccgggtgtcggg

SEQ ID NO: 2533 - DNA, 25 bp, Artificial Sequence
  Description of Artificial Sequence: Synthetic oligonucleotide
actgtgcgagattgtattcctgctt

SEQ ID NO: 2534 - DNA, 25 bp, Artificial Sequence
  Description of Artificial Sequence: Synthetic oligonucleotide
gtgtcgggcgcccagagatgccgcg

SEQ ID NO: 2535 - DNA, 25 bp, Artificial Sequence
  Description of Artificial Sequence: Synthetic oligonucleotide
ggaactatagaatttatccgtgata

SEQ ID NO: 2536 - DNA, 25 bp, Artificial Sequence
  Description of Artificial Sequence: Synthetic oligonucleotide
agagccgccggactcagcgagcaga

SEQ ID NO: 2537 - DNA, 25 bp, Artificial Sequence
  Description of Artificial Sequence: Synthetic oligonucleotide
ttctttccaagttagtaggcagatt

SEQ ID NO: 2538 - DNA, 25 bp, Artificial Sequence
  Description of Artificial Sequence: Synthetic oligonucleotide
gaaaaagaacactgtgcgagattgt

SEQ ID NO: 2539 - DNA, 25 bp, Artificial Sequence
  Description of Artificial Sequence: Synthetic oligonucleotide
tccgtgataataataaagttcgcat

SEQ ID NO: 2540 - DNA, 25 bp, Artificial Sequence
  Description of Artificial Sequence: Synthetic oligonucleotide
gcatccatcgaaacatctgggttta

SEQ ID NO: 2541 - DNA, 25 bp, Artificial Sequence
  Description of Artificial Sequence: Synthetic oligonucleotide
caggacttgtgaaagcctgggacga

SEQ ID NO: 2542 - DNA, 25 bp, Artificial Sequence
  Description of Artificial Sequence: Synthetic oligonucleotide
gggcttggggttttattctcaatat

SEQ ID NO: 2543 - DNA, 25 bp, Artificial Sequence
  Description of Artificial Sequence: Synthetic oligonucleotide
acatctgggtttacctgaaaagaaa

SEQ ID NO: 2544 - DNA, 25 bp, Artificial Sequence
  Description of Artificial Sequence: Synthetic oligonucleotide
agaaaatgattcaaggctgagagca

SEQ ID NO: 2545 - DNA, 25 bp, Artificial Sequence
  Description of Artificial Sequence: Synthetic oligonucleotide
gagagaagaatgtactgcttatcta

SEQ ID NO: 2546 - DNA, 25 bp, Artificial Sequence
  Description of Artificial Sequence: Synthetic oligonucleotide
tctcctcatgctcctgagagaagaa

SEQ ID NO: 2547 - DNA, 25 bp, Artificial Sequence
  Description of Artificial Sequence: Synthetic oligonucleotide
tttatctctcctcatgctcctgaga

SEQ ID NO: 2548 - DNA, 25 bp, Artificial Sequence
  Description of Artificial Sequence: Synthetic oligonucleotide
gagtggcaggatatactgacttatt

SEQ ID NO: 2549 - DNA, 25 bp, Artificial Sequence
  Description of Artificial Sequence: Synthetic oligonucleotide
gctcctgagagaagaatgtactgct

SEQ ID NO: 2550 - DNA, 25 bp, Artificial Sequence
  Description of Artificial Sequence: Synthetic oligonucleotide
atttctgcatccatcgaaacatctg

SEQ ID NO: 2551 - DNA, 25 bp, Artificial Sequence
  Description of Artificial Sequence: Synthetic oligonucleotide
tgtacgtattagtttgggccattat

SEQ ID NO: 2552 - DNA, 25 bp, Artificial Sequence
  Description of Artificial Sequence: Synthetic oligonucleotide
agtgtttatcatcacctcggatttc

SEQ ID NO: 2553 - DNA, 25 bp, Artificial Sequence
  Description of Artificial Sequence: Synthetic oligonucleotide
agtctcactgcaactgcttttaatt

SEQ ID NO: 2554 - DNA, 25 bp, Artificial Sequence
  Description of Artificial Sequence: Synthetic oligonucleotide
ggcatagaagccctgtacgtattag

SEQ ID NO: 2555 - DNA, 25 bp, Artificial Sequence
  Description of Artificial Sequence: Synthetic oligonucleotide
ggatttcacggcctaatgccagtca

SEQ ID NO: 2556 - DNA, 25 bp, Artificial Sequence
  Description of Artificial Sequence: Synthetic oligonucleotide
atcacctcggatttcacggcctaat

SEQ ID NO: 2557 - DNA, 25 bp, Artificial Sequence
  Description of Artificial Sequence: Synthetic oligonucleotide
attgtatcagtcttgtttattccca

SEQ ID NO: 2558 - DNA, 25 bp, Artificial Sequence
  Description of Artificial Sequence: Synthetic oligonucleotide
acgggccagtgagtcatttagtcat

SEQ ID NO: 2559 - DNA, 25 bp, Artificial Sequence
  Description of Artificial Sequence: Synthetic oligonucleotide
tttgcactataataccctccactga

SEQ ID NO: 2560 - DNA, 25 bp, Artificial Sequence
  Description of Artificial Sequence: Synthetic oligonucleotide
cggcctaatgccagtcaatttcatg

SEQ ID NO: 2561 - DNA, 25 bp, Artificial Sequence
  Description of Artificial Sequence: Synthetic oligonucleotide
gggccattattgtatcagtcttgtt

SEQ ID NO: 2562 - DNA, 25 bp, Artificial Sequence
  Description of Artificial Sequence: Synthetic oligonucleotide
agattctgcaggtactataatgaca

SEQ ID NO: 2563 - DNA, 25 bp, Artificial Sequence
  Description of Artificial Sequence: Synthetic oligonucleotide
cagattctgcaggtactataatgac

SEQ ID NO: 2564 - DNA, 25 bp, Artificial Sequence
  Description of Artificial Sequence: Synthetic oligonucleotide
aaactcagagattcgtggagactgg

SEQ ID NO: 2565 - DNA, 25 bp, Artificial Sequence
  Description of Artificial Sequence: Synthetic oligonucleotide
gagaaaactcagagattcgtggaga

SEQ ID NO: 2566 - DNA, 25 bp, Artificial Sequence
  Description of Artificial Sequence: Synthetic oligonucleotide
ctggaaccacgggtgtggagagagg

SEQ ID NO: 2567 - DNA, 25 bp, Artificial Sequence
  Description of Artificial Sequence: Synthetic oligonucleotide
agagaaaactcagagattcgtggag

SEQ ID NO: 2568 - DNA, 25 bp, Artificial Sequence
  Description of Artificial Sequence: Synthetic oligonucleotide
ctcagagattcgtggagactggaac

SEQ ID NO: 2569 - DNA, 25 bp, Artificial Sequence
  Description of Artificial Sequence: Synthetic oligonucleotide
gaccagattctgcaggtactataat

SEQ ID NO: 2570 - DNA, 25 bp, Artificial Sequence
  Description of Artificial Sequence: Synthetic oligonucleotide
accagattctgcaggtactataatg

SEQ ID NO: 2571 - DNA, 25 bp, Artificial Sequence
  Description of Artificial Sequence: Synthetic oligonucleotide
gaaaactcagagattcgtggagact

SEQ ID NO: 2572 - DNA, 25 bp, Artificial Sequence
  Description of Artificial Sequence: Synthetic oligonucleotide
gattctgcaggtactataatgacat

SEQ ID NO: 2573 - DNA, 25 bp, Artificial Sequence
  Description of Artificial Sequence: Synthetic oligonucleotide
tgtctttttagcttgcctaaatgta

SEQ ID NO: 2574 - DNA, 25 bp, Artificial Sequence
  Description of Artificial Sequence: Synthetic oligonucleotide
gaagggtctggaatcagtgatgttt

SEQ ID NO: 2575 - DNA, 25 bp, Artificial Sequence
  Description of Artificial Sequence: Synthetic oligonucleotide
tttcatttcagcattacacactata

SEQ ID NO: 2576 - DNA, 25 bp, Artificial Sequence
  Description of Artificial Sequence: Synthetic oligonucleotide
gtgcttgcatactcaaggagtctta

SEQ ID NO: 2577 - DNA, 25 bp, Artificial Sequence
  Description of Artificial Sequence: Synthetic oligonucleotide
taatggaatactcactgtaggatgc

SEQ ID NO: 2578 - DNA, 25 bp, Artificial Sequence
  Description of Artificial Sequence: Synthetic oligonucleotide
gtatagtcagtgcttgcatactcaa

SEQ ID NO: 2579 - DNA, 25 bp, Artificial Sequence
  Description of Artificial Sequence: Synthetic oligonucleotide
ggatgcaagcaagtgagaactacta

SEQ ID NO: 2580 - DNA, 25 bp, Artificial Sequence
  Description of Artificial Sequence: Synthetic oligonucleotide
gagaactactagtttcagtctcccc

SEQ ID NO: 2581 - DNA, 25 bp, Artificial Sequence
  Description of Artificial Sequence: Synthetic oligonucleotide
ttagtcagccagttaaagcattctc

SEQ ID NO: 2582 - DNA, 25 bp, Artificial Sequence
  Description of Artificial Sequence: Synthetic oligonucleotide
atactcactgtaggatgcaagcaag

SEQ ID NO: 2583 - DNA, 25 bp, Artificial Sequence
  Description of Artificial Sequence: Synthetic oligonucleotide
gtataaaacactcacataatggaat

SEQ ID NO: 2584 - DNA, 25 bp, Artificial Sequence
  Description of Artificial Sequence: Synthetic oligonucleotide
tacctgataacgtctctcttctcta

SEQ ID NO: 2585 - DNA, 25 bp, Artificial Sequence
  Description of Artificial Sequence: Synthetic oligonucleotide
gatatttatttaggttctaggacat

SEQ ID NO: 2586 - DNA, 25 bp, Artificial Sequence
  Description of Artificial Sequence: Synthetic oligonucleotide
aacaagggatgtctgattggaagta

SEQ ID NO: 2587 - DNA, 25 bp, Artificial Sequence
  Description of Artificial Sequence: Synthetic oligonucleotide
gtgatcacatacacttctttacctg

SEQ ID NO: 2588 - DNA, 25 bp, Artificial Sequence
  Description of Artificial Sequence: Synthetic oligonucleotide
ctacttaaaggtatcccttgaattc

SEQ ID NO: 2589 - DNA, 25 bp, Artificial Sequence
  Description of Artificial Sequence: Synthetic oligonucleotide
ctaggacattagtatcagtgaggac

SEQ ID NO: 2590 - DNA, 25 bp, Artificial Sequence
  Description of Artificial Sequence: Synthetic oligonucleotide
gtaatttcctgcttgtttgtatttc

SEQ ID NO: 2591 - DNA, 25 bp, Artificial Sequence
  Description of Artificial Sequence: Synthetic oligonucleotide
acacttctttacctgataacgtctc

SEQ ID NO: 2592 - DNA, 25 bp, Artificial Sequence
  Description of Artificial Sequence: Synthetic oligonucleotide
atggtgaaacaagggatgtctgatt

SEQ ID NO: 2593 - DNA, 25 bp, Artificial Sequence
  Description of Artificial Sequence: Synthetic oligonucleotide
tcagtgaggacagtaatttcctgct

SEQ ID NO: 2594 - DNA, 25 bp, Artificial Sequence
  Description of Artificial Sequence: Synthetic oligonucleotide
gtatttcagtgatcacatacacttc

SEQ ID NO: 2595 - DNA, 25 bp, Artificial Sequence
  Description of Artificial Sequence: Synthetic oligonucleotide
gacgtgtgtgcgcaagttcaccctc

SEQ ID NO: 2596 - DNA, 25 bp, Artificial Sequence
  Description of Artificial Sequence: Synthetic oligonucleotide
ccagaggagttcttgaccccaaaga

SEQ ID NO: 2597 - DNA, 25 bp, Artificial Sequence
  Description of Artificial Sequence: Synthetic oligonucleotide
ccgagctcacggatgctgtgaaggt

SEQ ID NO: 2598 - DNA, 25 bp, Artificial Sequence
  Description of Artificial Sequence: Synthetic oligonucleotide
aaaagcacctgctcgggtgattctg

SEQ ID NO: 2599 - DNA, 25 bp, Artificial Sequence
  Description of Artificial Sequence: Synthetic oligonucleotide
gttatttccaatgacgtgtgtgcgc

SEQ ID NO: 2600 - DNA, 25 bp, Artificial Sequence
  Description of Artificial Sequence: Synthetic oligonucleotide
gtgtggacctccatgttatttccaa

SEQ ID NO: 2601 - DNA, 25 bp, Artificial Sequence
  Description of Artificial Sequence: Synthetic oligonucleotide
ctgtcagagcctgccgagctcacgg

SEQ ID NO: 2602 - DNA, 25 bp, Artificial Sequence
  Description of Artificial Sequence: Synthetic oligonucleotide
aaagcacctgctcgggtgattctgg

SEQ ID NO: 2603 - DNA, 25 bp, Artificial Sequence
  Description of Artificial Sequence: Synthetic oligonucleotide
tcagagcctgccgagctcacggatg

SEQ ID NO: 2604 - DNA, 25 bp, Artificial Sequence
  Description of Artificial Sequence: Synthetic oligonucleotide
aagcacctgctcgggtgattctggg

SEQ ID NO: 2605 - DNA, 25 bp, Artificial Sequence
  Description of Artificial Sequence: Synthetic oligonucleotide
gttcttgaccccaaagaaacttcag

SEQ ID NO: 2606 - DNA, 25 bp, Artificial Sequence
  Description of Artificial Sequence: Synthetic oligonucleotide
tattgggtcgtctgcttcccttgta

SEQ ID NO: 2607 - DNA, 25 bp, Artificial Sequence
  Description of Artificial Sequence: Synthetic oligonucleotide
ggccctttatttatgacgactttat

SEQ ID NO: 2608 - DNA, 25 bp, Artificial Sequence
  Description of Artificial Sequence: Synthetic oligonucleotide
tatatatattgggtcgtctgcttcc

SEQ ID NO: 2609 - DNA, 25 bp, Artificial Sequence
  Description of Artificial Sequence: Synthetic oligonucleotide
tccaaaagcaagtagccaaagccgt

SEQ ID NO: 2610 - DNA, 25 bp, Artificial Sequence
  Description of Artificial Sequence: Synthetic oligonucleotide
tagccaaagccgttgccaaacccca

SEQ ID NO: 2611 - DNA, 25 bp, Artificial Sequence
  Description of Artificial Sequence: Synthetic oligonucleotide
atgggccctttatttatgacgactt

SEQ ID NO: 2612 - DNA, 25 bp, Artificial Sequence
  Description of Artificial Sequence: Synthetic oligonucleotide
caagtagccaaagccgttgccaaac

SEQ ID NO: 2613 - DNA, 25 bp, Artificial Sequence
  Description of Artificial Sequence: Synthetic oligonucleotide
atatatattgggtcgtctgcttccc

SEQ ID NO: 2614 - DNA, 25 bp, Artificial Sequence
  Description of Artificial Sequence: Synthetic oligonucleotide
atttatgacgactttatttattcta

SEQ ID NO: 2615 - DNA, 25 bp, Artificial Sequence
  Description of Artificial Sequence: Synthetic oligonucleotide
aagcaagtagccaaagccgttgcca

SEQ ID NO: 2616 - DNA, 25 bp, Artificial Sequence
  Description of Artificial Sequence: Synthetic oligonucleotide
ttttgtaatattgaaaacgacgata

SEQ ID NO: 2617 - DNA, 25 bp, Artificial Sequence
  Description of Artificial Sequence: Synthetic oligonucleotide
tggtgatggtttccacaggaacaac

SEQ ID NO: 2618 - DNA, 25 bp, Artificial Sequence
  Description of Artificial Sequence: Synthetic oligonucleotide
gatggtttccacaggaacaacagca

SEQ ID NO: 2619 - DNA, 25 bp, Artificial Sequence
  Description of Artificial Sequence: Synthetic oligonucleotide
accaaccttgctgggacttggatcc

SEQ ID NO: 2620 - DNA, 25 bp, Artificial Sequence
  Description of Artificial Sequence: Synthetic oligonucleotide
ggcaccaaccttgctgggacttgga

SEQ ID NO: 2621 - DNA, 25 bp, Artificial Sequence
  Description of Artificial Sequence: Synthetic oligonucleotide
gtgatggtttccacaggaacaacag

SEQ ID NO: 2622 - DNA, 25 bp, Artificial Sequence
  Description of Artificial Sequence: Synthetic oligonucleotide
tggcaccaaccttgctgggacttgg

SEQ ID NO: 2623 - DNA, 25 bp, Artificial Sequence
  Description of Artificial Sequence: Synthetic oligonucleotide
ccttgctgggacttggatcccaggg

SEQ ID NO: 2624 - DNA, 25 bp, Artificial Sequence
  Description of Artificial Sequence: Synthetic oligonucleotide
atggtttccacaggaacaacagcat

SEQ ID NO: 2625 - DNA, 25 bp, Artificial Sequence
  Description of Artificial Sequence: Synthetic oligonucleotide
ggtgatggtttccacaggaacaaca

SEQ ID NO: 2626 - DNA, 25 bp, Artificial Sequence
  Description of Artificial Sequence: Synthetic oligonucleotide
gcaccaaccttgctgggacttggat

SEQ ID NO: 2627 - DNA, 25 bp, Artificial Sequence
  Description of Artificial Sequence: Synthetic oligonucleotide
aaccttgctgggacttggatcccag

SEQ ID NO: 2628 - DNA, 25 bp, Artificial Sequence
  Description of Artificial Sequence: Synthetic oligonucleotide
tcaattgcttagtgtttctaatcat

SEQ ID NO: 2629 - DNA, 25 bp, Artificial Sequence
  Description of Artificial Sequence: Synthetic oligonucleotide
ccccgttcaaggtatagtctgcctt

SEQ ID NO: 2630 - DNA, 25 bp, Artificial Sequence
  Description of Artificial Sequence: Synthetic oligonucleotide
agagggatgcattacctttttgctt

SEQ ID NO: 2631 - DNA, 25 bp, Artificial Sequence
  Description of Artificial Sequence: Synthetic oligonucleotide
gtttctaatcatacttaatccacac

SEQ ID NO: 2632 - DNA, 25 bp, Artificial Sequence
  Description of Artificial Sequence: Synthetic oligonucleotide
ttgacttagatccaaaacagcctct

SEQ ID NO: 2633 - DNA, 25 bp, Artificial Sequence
  Description of Artificial Sequence: Synthetic oligonucleotide
gtatagtctgcctttaagggagttt

SEQ ID NO: 2634 - DNA, 25 bp, Artificial Sequence
  Description of Artificial Sequence: Synthetic oligonucleotide
aacagcctctctcatgtctaaaaag

SEQ ID NO: 2635 - DNA, 25 bp, Artificial Sequence
  Description of Artificial Sequence: Synthetic oligonucleotide
agatccaaaacagcctctctcatgt

SEQ ID NO: 2636 - DNA, 25 bp, Artificial Sequence
  Description of Artificial Sequence: Synthetic oligonucleotide
tacttaatccacactaatgtgcgca

SEQ ID NO: 2637 - DNA, 25 bp, Artificial Sequence
  Description of Artificial Sequence: Synthetic oligonucleotide
gggagttttagaaccaacatgcaag

SEQ ID NO: 2638 - DNA, 25 bp, Artificial Sequence
  Description of Artificial Sequence: Synthetic oligonucleotide
cttgcaagagccattattgacttag

SEQ ID NO: 2639 - DNA, 25 bp, Artificial Sequence
  Description of Artificial Sequence: Synthetic oligonucleotide
tatttaagcttatgtcagacctatt

SEQ ID NO: 2640 - DNA, 25 bp, Artificial Sequence
  Description of Artificial Sequence: Synthetic oligonucleotide
atgtatggaatacagtgttattttc

SEQ ID NO: 2641 - DNA, 25 bp, Artificial Sequence
  Description of Artificial Sequence: Synthetic oligonucleotide
actactgtgatcaggctatgtatgg

SEQ ID NO: 2642 - DNA, 25 bp, Artificial Sequence
  Description of Artificial Sequence: Synthetic oligonucleotide
aagcttatgtcagacctatttgaca

SEQ ID NO: 2643 - DNA, 25 bp, Artificial Sequence
  Description of Artificial Sequence: Synthetic oligonucleotide
atttatttaagcttatgtcagacct

SEQ ID NO: 2644 - DNA, 25 bp, Artificial Sequence
  Description of Artificial Sequence: Synthetic oligonucleotide
tagctgtgtgaaataccagtgtggt

SEQ ID NO: 2645 - DNA, 25 bp, Artificial Sequence
  Description of Artificial Sequence: Synthetic oligonucleotide
agaacaactactgtgatcaggctat

SEQ ID NO: 2646 - DNA, 25 bp, Artificial Sequence
  Description of Artificial Sequence: Synthetic oligonucleotide
aattagctgtgtgaaataccagtgt

SEQ ID NO: 2647 - DNA, 25 bp, Artificial Sequence
  Description of Artificial Sequence: Synthetic oligonucleotide
gacataacactataaaggttgacaa

SEQ ID NO: 2648 - DNA, 25 bp, Artificial Sequence
  Description of Artificial Sequence: Synthetic oligonucleotide
cagacctatttgacataacactata

SEQ ID NO: 2649 - DNA, 25 bp, Artificial Sequence
  Description of Artificial Sequence: Synthetic oligonucleotide
aagagagaacaactactgtgatcag

SEQ ID NO: 2650 - DNA, 25 bp, Artificial Sequence
  Description of Artificial Sequence: Synthetic oligonucleotide
accagccagagggtagggcacaaag

SEQ ID NO: 2651 - DNA, 25 bp, Artificial Sequence
  Description of Artificial Sequence: Synthetic oligonucleotide
gcacaaagatggatgtaatgcactt

SEQ ID NO: 2652 - DNA, 25 bp, Artificial Sequence
  Description of Artificial Sequence: Synthetic oligonucleotide
atttatgggagaattgcacacagat

SEQ ID NO: 2653 - DNA, 25 bp, Artificial Sequence
  Description of Artificial Sequence: Synthetic oligonucleotide
ggattcaactaccttagataatatt

SEQ ID NO: 2654 - DNA, 25 bp, Artificial Sequence
  Description of Artificial Sequence: Synthetic oligonucleotide
gcagctcggattcaactaccttaga

SEQ ID NO: 2655 - DNA, 25 bp, Artificial Sequence
  Description of Artificial Sequence: Synthetic oligonucleotide
gctcggattcaactaccttagataa

SEQ ID NO: 2656 - DNA, 25 bp, Artificial Sequence
  Description of Artificial Sequence: Synthetic oligonucleotide
acaggcagctcggattcaactacct

SEQ ID NO: 2657 - DNA, 25 bp, Artificial Sequence
  Description of Artificial Sequence: Synthetic oligonucleotide
tttaaagaccaatttatgggagaat

SEQ ID NO: 2658 - DNA, 25 bp, Artificial Sequence
  Description of Artificial Sequence: Synthetic oligonucleotide
tttctgaaaacctaccagccagagg

SEQ ID NO: 2659 - DNA, 25 bp, Artificial Sequence
  Description of Artificial Sequence: Synthetic oligonucleotide
ggtagggcacaaagatggatgtaat

SEQ ID NO: 2660 - DNA, 25 bp, Artificial Sequence
  Description of Artificial Sequence: Synthetic oligonucleotide
atttctgaaaacctaccagccagag

SEQ ID NO: 2661 - DNA, 25 bp, Artificial Sequence
  Description of Artificial Sequence: Synthetic oligonucleotide
gagtgcctctcatgatccttgacga

SEQ ID NO: 2662 - DNA, 25 bp, Artificial Sequence
  Description of Artificial Sequence: Synthetic oligonucleotide
ttagtgcttcagagtttgtgtgtat

SEQ ID NO: 2663 - DNA, 25 bp, Artificial Sequence
  Description of Artificial Sequence: Synthetic oligonucleotide
gtattaataaagcattcttcaacag

SEQ ID NO: 2664 - DNA, 25 bp, Artificial Sequence
  Description of Artificial Sequence: Synthetic oligonucleotide
ttaaatttcttagtgcttcagagtt

SEQ ID NO: 2665 - DNA, 25 bp, Artificial Sequence
  Description of Artificial Sequence: Synthetic oligonucleotide
ggatgttgaattgccacctgtttgc

SEQ ID NO: 2666 - DNA, 25 bp, Artificial Sequence
  Description of Artificial Sequence: Synthetic oligonucleotide
catgggaatccaatctgttgcagtc

SEQ ID NO: 2667 - DNA, 25 bp, Artificial Sequence
  Description of Artificial Sequence: Synthetic oligonucleotide
aattgccacctgtttgctgtgacat

SEQ ID NO: 2668 - DNA, 25 bp, Artificial Sequence
  Description of Artificial Sequence: Synthetic oligonucleotide
ggaatccaatctgttgcagtctcct

SEQ ID NO: 2669 - DNA, 25 bp, Artificial Sequence
  Description of Artificial Sequence: Synthetic oligonucleotide
tagtgcttcagagtttgtgtgtatt

SEQ ID NO: 2670 - DNA, 25 bp, Artificial Sequence
  Description of Artificial Sequence: Synthetic oligonucleotide
attaataaagcattcttcaacagaa

SEQ ID NO: 2671 - DNA, 25 bp, Artificial Sequence
  Description of Artificial Sequence: Synthetic oligonucleotide
tgcgcacctccccttgagtggagtg

SEQ ID NO: 2672 - DNA, 25 bp, Artificial Sequence
  Description of Artificial Sequence: Synthetic oligonucleotide
gagatgtgaacacatcagcttgccc

SEQ ID NO: 2673 - DNA, 25 bp, Artificial Sequence
  Description of Artificial Sequence: Synthetic oligonucleotide
aaagaggcagcttgaaactgagatg

SEQ ID NO: 2674 - DNA, 25 bp, Artificial Sequence
  Description of Artificial Sequence: Synthetic oligonucleotide
acatcagcttgccctgttaaaagat

SEQ ID NO: 2675 - DNA, 25 bp, Artificial Sequence
  Description of Artificial Sequence: Synthetic oligonucleotide
tgagatgtgaacacatcagcttgcc

SEQ ID NO: 2676 - DNA, 25 bp, Artificial Sequence
  Description of Artificial Sequence: Synthetic oligonucleotide
atcagcttgccctgttaaaagatga

SEQ ID NO: 2677 - DNA, 25 bp, Artificial Sequence
  Description of Artificial Sequence: Synthetic oligonucleotide
catcagcttgccctgttaaaagatg

SEQ ID NO: 2678 - DNA, 25 bp, Artificial Sequence
  Description of Artificial Sequence: Synthetic oligonucleotide
gtgaaagaggcagcttgaaactgag

SEQ ID NO: 2679 - DNA, 25 bp, Artificial Sequence
  Description of Artificial Sequence: Synthetic oligonucleotide
aagaggcagcttgaaactgagatgt

SEQ ID NO: 2680 - DNA, 25 bp, Artificial Sequence
  Description of Artificial Sequence: Synthetic oligonucleotide
taacttgaaggagtccttgcatcaa

SEQ ID NO: 2681 - DNA, 25 bp, Artificial Sequence
  Description of Artificial Sequence: Synthetic oligonucleotide
tagtgaaagaggcagcttgaaactg

SEQ ID NO: 2682 - DNA, 25 bp, Artificial Sequence
  Description of Artificial Sequence: Synthetic oligonucleotide
ttaacttgaaggagtccttgcatca

SEQ ID NO: 2683 - DNA, 25 bp, Artificial Sequence
  Description of Artificial Sequence: Synthetic oligonucleotide
tatgtctttcttgtaaggcatactg

SEQ ID NO: 2684 - DNA, 25 bp, Artificial Sequence
  Description of Artificial Sequence: Synthetic oligonucleotide
tctttcttgtaaggcatactgcctt

SEQ ID NO: 2685 - DNA, 25 bp, Artificial Sequence
  Description of Artificial Sequence: Synthetic oligonucleotide
tgtctttcttgtaaggcatactgcc

SEQ ID NO: 2686 - DNA, 25 bp, Artificial Sequence
  Description of Artificial Sequence: Synthetic oligonucleotide
tcttgtaaggcatactgccttgttt

SEQ ID NO: 2687 - DNA, 25 bp, Artificial Sequence
  Description of Artificial Sequence: Synthetic oligonucleotide
ctttcttgtaaggcatactgccttg

SEQ ID NO: 2688 - DNA, 25 bp, Artificial Sequence
  Description of Artificial Sequence: Synthetic oligonucleotide
gtctttcttgtaaggcatactgcct

SEQ ID NO: 2689 - DNA, 25 bp, Artificial Sequence
  Description of Artificial Sequence: Synthetic oligonucleotide
ttatgtctttcttgtaaggcatact

SEQ ID NO: 2690 - DNA, 25 bp, Artificial Sequence
  Description of Artificial Sequence: Synthetic oligonucleotide
tttcttgtaaggcatactgccttgt

SEQ ID NO: 2691 - DNA, 25 bp, Artificial Sequence
  Description of Artificial Sequence: Synthetic oligonucleotide
ttcttgtaaggcatactgccttgtt

SEQ ID NO: 2692 - DNA, 25 bp, Artificial Sequence
  Description of Artificial Sequence: Synthetic oligonucleotide
atgtctttcttgtaaggcatactgc

SEQ ID NO: 2693 - DNA, 25 bp, Artificial Sequence
  Description of Artificial Sequence: Synthetic oligonucleotide
gagcagagaggtttcgatatttatt

SEQ ID NO: 2694 - DNA, 25 bp, Artificial Sequence
  Description of Artificial Sequence: Synthetic oligonucleotide
gcagagaggtttcgatatttattga

SEQ ID NO: 2695 - DNA, 25 bp, Artificial Sequence
  Description of Artificial Sequence: Synthetic oligonucleotide
cgatatttattgatgttttcacaaa

SEQ ID NO: 2696 - DNA, 25 bp, Artificial Sequence
  Description of Artificial Sequence: Synthetic oligonucleotide
aattatgcagtgtttccctctgtgt

SEQ ID NO: 2697 - DNA, 25 bp, Artificial Sequence
  Description of Artificial Sequence: Synthetic oligonucleotide
ctgccttgtttaatgttaattatgc

SEQ ID NO: 2698 - DNA, 25 bp, Artificial Sequence
  Description of Artificial Sequence: Synthetic oligonucleotide
gtgttagagcagagaggtttcgata

SEQ ID NO: 2699 - DNA, 25 bp, Artificial Sequence
  Description of Artificial Sequence: Synthetic oligonucleotide
gtgtgtctattttgtaactgtaaag

SEQ ID NO: 2700 - DNA, 25 bp, Artificial Sequence
  Description of Artificial Sequence: Synthetic oligonucleotide
taatgttaattatgcagtgtttccc

SEQ ID NO: 2701 - DNA, 25 bp, Artificial Sequence
  Description of Artificial Sequence: Synthetic oligonucleotide
gtgtttccctctgtgttagagcaga

SEQ ID NO: 2702 - DNA, 25 bp, Artificial Sequence
  Description of Artificial Sequence: Synthetic oligonucleotide
atgtgtgtctattttgtaactgtaa

SEQ ID NO: 2703 - DNA, 25 bp, Artificial Sequence
  Description of Artificial Sequence: Synthetic oligonucleotide
tgcagtgtttccctctgtgttagag

SEQ ID NO: 2704 - DNA, 25 bp, Artificial Sequence
  Description of Artificial Sequence: Synthetic oligonucleotide
tctttcatccatacctgtgcatgag

SEQ ID NO: 2705 - DNA, 25 bp, Artificial Sequence
  Description of Artificial Sequence: Synthetic oligonucleotide
ctttcatccatacctgtgcatgagc

SEQ ID NO: 2706 - DNA, 25 bp, Artificial Sequence
  Description of Artificial Sequence: Synthetic oligonucleotide
tttcatccatacctgtgcatgagct

SEQ ID NO: 2707 - DNA, 25 bp, Artificial Sequence
  Description of Artificial Sequence: Synthetic oligonucleotide
tcatccatacctgtgcatgagctgt

SEQ ID NO: 2708 - DNA, 25 bp, Artificial Sequence
  Description of Artificial Sequence: Synthetic oligonucleotide
catccatacctgtgcatgagctgta

SEQ ID NO: 2709 - DNA, 25 bp, Artificial Sequence
  Description of Artificial Sequence: Synthetic oligonucleotide
gtgcatgagctgtattcttcacagc

SEQ ID NO: 2710 - DNA, 25 bp, Artificial Sequence
  Description of Artificial Sequence: Synthetic oligonucleotide
acagcaacagagctcagttaaatgc

SEQ ID NO: 2711 - DNA, 25 bp, Artificial Sequence
  Description of Artificial Sequence: Synthetic oligonucleotide
cagcaacagagctcagttaaatgca

SEQ ID NO: 2712 - DNA, 25 bp, Artificial Sequence
  Description of Artificial Sequence: Synthetic oligonucleotide
gcaacagagctcagttaaatgcaac

SEQ ID NO: 2713 - DNA, 25 bp, Artificial Sequence
  Description of Artificial Sequence: Synthetic oligonucleotide
acagagctcagttaaatgcaactgc

SEQ ID NO: 2714 - DNA, 25 bp, Artificial Sequence
  Description of Artificial Sequence: Synthetic oligonucleotide
agagctcagttaaatgcaactgcaa

SEQ ID NO: 2715 - DNA, 25 bp, Artificial Sequence
  Description of Artificial Sequence: Synthetic oligonucleotide
tgctcatctgtattgatgtccttgg

SEQ ID NO: 2716 - DNA, 25 bp, Artificial Sequence
  Description of Artificial Sequence: Synthetic oligonucleotide
tcatctgtattgatgtccttggagt

SEQ ID NO: 2717 - DNA, 25 bp, Artificial Sequence
  Description of Artificial Sequence: Synthetic oligonucleotide
ctcatctgtattgatgtccttggag

SEQ ID NO: 2718 - DNA, 25 bp, Artificial Sequence
  Description of Artificial Sequence: Synthetic oligonucleotide
agtgtcaaaaagaatatgtggtttt

SEQ ID NO: 2719 - DNA, 25 bp, Artificial Sequence
  Description of Artificial Sequence: Synthetic oligonucleotide
agtggaacttaagtgtcaaaaagaa

SEQ ID NO: 2720 - DNA, 25 bp, Artificial Sequence
  Description of Artificial Sequence: Synthetic oligonucleotide
ggagttctacaagtggaacttaagt

SEQ ID NO: 2721 - DNA, 25 bp, Artificial Sequence
  Description of Artificial Sequence: Synthetic oligonucleotide
atatgtggtttttagctgagcgtgg

SEQ ID NO: 2722 - DNA, 25 bp, Artificial Sequence
  Description of Artificial Sequence: Synthetic oligonucleotide
tggagttctacaagtggaacttaag

SEQ ID NO: 2723 - DNA, 25 bp, Artificial Sequence
  Description of Artificial Sequence: Synthetic oligonucleotide
gctcatctgtattgatgtccttgga

SEQ ID NO: 2724 - DNA, 25 bp, Artificial Sequence
  Description of Artificial Sequence: Synthetic oligonucleotide
catctgtattgatgtccttggagtt

SEQ ID NO: 2725 - DNA, 25 bp, Artificial Sequence
  Description of Artificial Sequence: Synthetic oligonucleotide
actcagctctctcatggaagtcgga

SEQ ID NO: 2726 - DNA, 25 bp, Artificial Sequence
  Description of Artificial Sequence: Synthetic oligonucleotide
acctgtcccgtctccaacattaaag

SEQ ID NO: 2727 - DNA, 25 bp, Artificial Sequence
  Description of Artificial Sequence: Synthetic oligonucleotide
tcctccgtgtggctagggagctgct

SEQ ID NO: 2728 - DNA, 25 bp, Artificial Sequence
  Description of Artificial Sequence: Synthetic oligonucleotide
tagggagctgctgtccagaggcgga

SEQ ID NO: 2729 - DNA, 25 bp, Artificial Sequence
  Description of Artificial Sequence: Synthetic oligonucleotide
ctctctcatggaagtcggagccctc

SEQ ID NO: 2730 - DNA, 25 bp, Artificial Sequence
  Description of Artificial Sequence: Synthetic oligonucleotide
agatcaggccccaaagtcctgctgg

SEQ ID NO: 2731 - DNA, 25 bp, Artificial Sequence
  Description of Artificial Sequence: Synthetic oligonucleotide
ggcggaggtaaacattgatccctcc

SEQ ID NO: 2732 - DNA, 25 bp, Artificial Sequence
  Description of Artificial Sequence: Synthetic oligonucleotide
ggagccctcagggtcacctgaaaac

SEQ ID NO: 2733 - DNA, 25 bp, Artificial Sequence
  Description of Artificial Sequence: Synthetic oligonucleotide
atgaccttgccgcatgaggcctgag

SEQ ID NO: 2734 - DNA, 25 bp, Artificial Sequence
  Description of Artificial Sequence: Synthetic oligonucleotide
gtgacccatgaccttgccgcatgag

SEQ ID NO: 2735 - DNA, 25 bp, Artificial Sequence
  Description of Artificial Sequence: Synthetic oligonucleotide
tcccgtctccaacattaaagctttt

SEQ ID NO: 2736 - DNA, 25 bp, Artificial Sequence
  Description of Artificial Sequence: Synthetic oligonucleotide
gggaggtgtattgaagtcctccaga

SEQ ID NO: 2737 - DNA, 25 bp, Artificial Sequence
  Description of Artificial Sequence: Synthetic oligonucleotide
gatgatttcctagtagaactcacag

SEQ ID NO: 2738 - DNA, 25 bp, Artificial Sequence
  Description of Artificial Sequence: Synthetic oligonucleotide
ttgatgatttcctagtagaactcac

SEQ ID NO: 2739 - DNA, 25 bp, Artificial Sequence
  Description of Artificial Sequence: Synthetic oligonucleotide
agaaataaagagctgttatactgtg

SEQ ID NO: 2740 - DNA, 25 bp, Artificial Sequence
  Description of Artificial Sequence: Synthetic oligonucleotide
gaagctggaggcacaacgcaccaga

SEQ ID NO: 2741 - DNA, 25 bp, Artificial Sequence
  Description of Artificial Sequence: Synthetic oligonucleotide
cagaaataaagagctgttatactgt

SEQ ID NO: 2742 - DNA, 25 bp, Artificial Sequence
  Description of Artificial Sequence: Synthetic oligonucleotide
tgaagtcctccagacaaccctcaga

SEQ ID NO: 2743 - DNA, 25 bp, Artificial Sequence
  Description of Artificial Sequence: Synthetic oligonucleotide
ttcctagtagaactcacagaaataa

SEQ ID NO: 2744 - DNA, 25 bp, Artificial Sequence
  Description of Artificial Sequence: Synthetic oligonucleotide
aggtgtattgaagtcctccagacaa

SEQ ID NO: 2745 - DNA, 25 bp, Artificial Sequence
  Description of Artificial Sequence: Synthetic oligonucleotide
gctgaaaacataacccactctgtcc

SEQ ID NO: 2746 - DNA, 25 bp, Artificial Sequence
  Description of Artificial Sequence: Synthetic oligonucleotide
aaccctcagatttgatgatttccta

SEQ ID NO: 2747 - DNA, 25 bp, Artificial Sequence
  Description of Artificial Sequence: Synthetic oligonucleotide
agcatgctaagactaaagaagcagg

SEQ ID NO: 2748 - DNA, 25 bp, Artificial Sequence
  Description of Artificial Sequence: Synthetic oligonucleotide
gagagagaaggaacacctccgatcg

SEQ ID NO: 2749 - DNA, 25 bp, Artificial Sequence
  Description of Artificial Sequence: Synthetic oligonucleotide
gatgggcagccataagttaaaaaga

SEQ ID NO: 2750 - DNA, 25 bp, Artificial Sequence
  Description of Artificial Sequence: Synthetic oligonucleotide
gagagaaggaacacctccgatcgaa

SEQ ID NO: 2751 - DNA, 25 bp, Artificial Sequence
  Description of Artificial Sequence: Synthetic oligonucleotide
aaagactcggagtgagcgtggagat

SEQ ID NO: 2752 - DNA, 25 bp, Artificial Sequence
  Description of Artificial Sequence: Synthetic oligonucleotide
ggatattgaacctggacaagagaga

SEQ ID NO: 2753 - DNA, 25 bp, Artificial Sequence
  Description of Artificial Sequence: Synthetic oligonucleotide
agtagaaggtgattgccaggaaatg

SEQ ID NO: 2754 - DNA, 25 bp, Artificial Sequence
  Description of Artificial Sequence: Synthetic oligonucleotide
gagatgggcagccataagttaaaaa

SEQ ID NO: 2755 - DNA, 25 bp, Artificial Sequence
  Description of Artificial Sequence: Synthetic oligonucleotide
gatctggaaaagactcggagtgagc

SEQ ID NO: 2756 - DNA, 25 bp, Artificial Sequence
  Description of Artificial Sequence: Synthetic oligonucleotide
aacgtaaagtagaaggtgattgcca

SEQ ID NO: 2757 - DNA, 25 bp, Artificial Sequence
  Description of Artificial Sequence: Synthetic oligonucleotide
aaggtgattgccaggaaatggatct

SEQ ID NO: 2758 - DNA, 25 bp, Artificial Sequence
  Description of Artificial Sequence: Synthetic oligonucleotide
tgtcgctttcattatgtctcttggt

SEQ ID NO: 2759 - DNA, 25 bp, Artificial Sequence
  Description of Artificial Sequence: Synthetic oligonucleotide
tggtaactggcttcggttgtgtctc

SEQ ID NO: 2760 - DNA, 25 bp, Artificial Sequence
  Description of Artificial Sequence: Synthetic oligonucleotide
ttatgtctcttggtaactggcttcg

SEQ ID NO: 2761 - DNA, 25 bp, Artificial Sequence
  Description of Artificial Sequence: Synthetic oligonucleotide
ctctttgtgtcgctttcattatgtc

SEQ ID NO: 2762 - DNA, 25 bp, Artificial Sequence
  Description of Artificial Sequence: Synthetic oligonucleotide
tcggttgtgtctctccgtgtgacta

SEQ ID NO: 2763 - DNA, 25 bp, Artificial Sequence
  Description of Artificial Sequence: Synthetic oligonucleotide
cctctatgtctctttgtgtcgcttt

SEQ ID NO: 2764 - DNA, 25 bp, Artificial Sequence
  Description of Artificial Sequence: Synthetic oligonucleotide
gctttcattatgtctcttggtaact

SEQ ID NO: 2765 - DNA, 25 bp, Artificial Sequence
  Description of Artificial Sequence: Synthetic oligonucleotide
tctatgtctctttgtgtcgctttca

SEQ ID NO: 2766 - DNA, 25 bp, Artificial Sequence
  Description of Artificial Sequence: Synthetic oligonucleotide
tgtctctccgtgtgactattttgtt

SEQ ID NO: 2767 - DNA, 25 bp, Artificial Sequence
  Description of Artificial Sequence: Synthetic oligonucleotide
gtctcttggtaactggcttcggttg

SEQ ID NO: 2768 - DNA, 25 bp, Artificial Sequence
  Description of Artificial Sequence: Synthetic oligonucleotide
taactggcttcggttgtgtctctcc

SEQ ID NO: 2769 - DNA, 25 bp, Artificial Sequence
  Description of Artificial Sequence: Synthetic oligonucleotide
gagtggaaccaaaagaggccaagtt

SEQ ID NO: 2770 - DNA, 25 bp, Artificial Sequence
  Description of Artificial Sequence: Synthetic oligonucleotide
gtatcagtgttcagttaggaagttc

SEQ ID NO: 2771 - DNA, 25 bp, Artificial Sequence
  Description of Artificial Sequence: Synthetic oligonucleotide
agctgcaatgttcacagtaatccaa

SEQ ID NO: 2772 - DNA, 25 bp, Artificial Sequence
  Description of Artificial Sequence: Synthetic oligonucleotide
gttaggaagttcttatgatagtgca

SEQ ID NO: 2773 - DNA, 25 bp, Artificial Sequence
  Description of Artificial Sequence: Synthetic oligonucleotide
tattttttaagatcagggattcaga

SEQ ID NO: 2774 - DNA, 25 bp, Artificial Sequence
  Description of Artificial Sequence: Synthetic oligonucleotide
gtaatccaagttccaatggcagggt

SEQ ID NO: 2775 - DNA, 25 bp, Artificial Sequence
  Description of Artificial Sequence: Synthetic oligonucleotide
tccaagttccaatggcagggtggca

SEQ ID NO: 2776 - DNA, 25 bp, Artificial Sequence
  Description of Artificial Sequence: Synthetic oligonucleotide
attttgctatagctgcaatgttcac

SEQ ID NO: 2777 - DNA, 25 bp, Artificial Sequence
  Description of Artificial Sequence: Synthetic oligonucleotide
agttcttatgatagtgcatggcaca

SEQ ID NO: 2778 - DNA, 25 bp, Artificial Sequence
  Description of Artificial Sequence: Synthetic oligonucleotide
ggattcagaattgtagtatcagtgt

SEQ ID NO: 2779 - DNA, 25 bp, Artificial Sequence
  Description of Artificial Sequence: Synthetic oligonucleotide
cacagtaatccaagttccaatggca

SEQ ID NO: 2780 - DNA, 25 bp, Artificial Sequence
  Description of Artificial Sequence: Synthetic oligonucleotide
gagtggaaccaaaagaggccaagtt

SEQ ID NO: 2781 - DNA, 25 bp, Artificial Sequence
  Description of Artificial Sequence: Synthetic oligonucleotide
gtatcagtgttcagttaggaagttc

SEQ ID NO: 2782 - DNA, 25 bp, Artificial Sequence
  Description of Artificial Sequence: Synthetic oligonucleotide
agctgcaatgttcacagtaatccaa

SEQ ID NO: 2783 - DNA, 25 bp, Artificial Sequence
  Description of Artificial Sequence: Synthetic oligonucleotide
tattttttaagatcagggattcaga

SEQ ID NO: 2784 - DNA, 25 bp, Artificial Sequence
  Description of Artificial Sequence: Synthetic oligonucleotide
gtaatccaagttccaatggcagggt

SEQ ID NO: 2785 - DNA, 25 bp, Artificial Sequence
  Description of Artificial Sequence: Synthetic oligonucleotide
tccaagttccaatggcagggtggca

SEQ ID NO: 2786 - DNA, 25 bp, Artificial Sequence
  Description of Artificial Sequence: Synthetic oligonucleotide
atgtcctttccatcatctgcatttt

SEQ ID NO: 2787 - DNA, 25 bp, Artificial Sequence
  Description of Artificial Sequence: Synthetic oligonucleotide
attttgctatagctgcaatgttcac

SEQ ID NO: 2788 - DNA, 25 bp, Artificial Sequence
  Description of Artificial Sequence: Synthetic oligonucleotide
agttcttatgatagtgcatggcaca

SEQ ID NO: 2789 - DNA, 25 bp, Artificial Sequence
  Description of Artificial Sequence: Synthetic oligonucleotide
ggattcagaattgtagtatcagtgt

SEQ ID NO: 2790 - DNA, 25 bp, Artificial Sequence
  Description of Artificial Sequence: Synthetic oligonucleotide
gcatggcacatgtcctttccatcat

SEQ ID NO: 2791 - DNA, 25 bp, Artificial Sequence
  Description of Artificial Sequence: Synthetic oligonucleotide
aatttgagcaccaggattccccctc

SEQ ID NO: 2792 - DNA, 25 bp, Artificial Sequence
  Description of Artificial Sequence: Synthetic oligonucleotide
tcaggagaggttccagttaccagga

SEQ ID NO: 2793 - DNA, 25 bp, Artificial Sequence
  Description of Artificial Sequence: Synthetic oligonucleotide
gaggttccagttaccaggagacact

SEQ ID NO: 2794 - DNA, 25 bp, Artificial Sequence
  Description of Artificial Sequence: Synthetic oligonucleotide
ggagacactggaacctcaggtctat

SEQ ID NO: 2795 - DNA, 25 bp, Artificial Sequence
  Description of Artificial Sequence: Synthetic oligonucleotide
ggaacctcaggtctataaaaactgg

SEQ ID NO: 2796 - DNA, 25 bp, Artificial Sequence
  Description of Artificial Sequence: Synthetic oligonucleotide
ggcagtgaaggcctattattcacag

SEQ ID NO: 2797 - DNA, 25 bp, Artificial Sequence
  Description of Artificial Sequence: Synthetic oligonucleotide
tattcacagcacataagattctagg

SEQ ID NO: 2798 - DNA, 25 bp, Artificial Sequence
  Description of Artificial Sequence: Synthetic oligonucleotide
acagcacataagattctaggagaca

SEQ ID NO: 2799 - DNA, 25 bp, Artificial Sequence
  Description of Artificial Sequence: Synthetic oligonucleotide
attctaggagacagatttgggcagg

SEQ ID NO: 2800 - DNA, 25 bp, Artificial Sequence
  Description of Artificial Sequence: Synthetic oligonucleotide
agagggttcattgcctcccttaaat

SEQ ID NO: 2801 - DNA, 25 bp, Artificial Sequence
  Description of Artificial Sequence: Synthetic oligonucleotide
cttcatttatcttccagatagtaga

SEQ ID NO: 2802 - DNA, 25 bp, Artificial Sequence
  Description of Artificial Sequence: Synthetic oligonucleotide
tcatttatcttccagatagtagatt

SEQ ID NO: 2803 - DNA, 25 bp, Artificial Sequence
  Description of Artificial Sequence: Synthetic oligonucleotide
ttatcttccagatagtagattctat

SEQ ID NO: 2804 - DNA, 25 bp, Artificial Sequence
  Description of Artificial Sequence: Synthetic oligonucleotide
cttccagatagtagattctattaac

SEQ ID NO: 2805 - DNA, 25 bp, Artificial Sequence
  Description of Artificial Sequence: Synthetic oligonucleotide
ccagatagtagattctattaaccaa

SEQ ID NO: 2806 - DNA, 25 bp, Artificial Sequence
  Description of Artificial Sequence: Synthetic oligonucleotide
cagatagtagattctattaaccaag

SEQ ID NO: 2807 - DNA, 25 bp, Artificial Sequence
  Description of Artificial Sequence: Synthetic oligonucleotide
gatagtagattctattaaccaagtt

SEQ ID NO: 2808 - DNA, 25 bp, Artificial Sequence
  Description of Artificial Sequence: Synthetic oligonucleotide
atcttccagatagtagattctatta

SEQ ID NO: 2809 - DNA, 25 bp, Artificial Sequence
  Description of Artificial Sequence: Synthetic oligonucleotide
atttatcttccagatagtagattct

SEQ ID NO: 2810 - DNA, 25 bp, Artificial Sequence
  Description of Artificial Sequence: Synthetic oligonucleotide
ttccagatagtagattctattaacc

SEQ ID NO: 2811 - DNA, 25 bp, Artificial Sequence
  Description of Artificial Sequence: Synthetic oligonucleotide
ttcatttatcttccagatagtagat

SEQ ID NO: 2812 - DNA, 25 bp, Artificial Sequence
  Description of Artificial Sequence: Synthetic oligonucleotide
gtagattctattaaccaagttgcat

SEQ ID NO: 2813 - DNA, 25 bp, Artificial Sequence
  Description of Artificial Sequence: Synthetic oligonucleotide
cttcatttatcttccagatagtaga

SEQ ID NO: 2814 - DNA, 25 bp, Artificial Sequence
  Description of Artificial Sequence: Synthetic oligonucleotide
tccagatagtagattctattaacca

SEQ ID NO: 2815 - DNA, 25 bp, Artificial Sequence
  Description of Artificial Sequence: Synthetic oligonucleotide
gttctgattcccagaaggtaaagaa

SEQ ID NO: 2816 - DNA, 25 bp, Artificial Sequence
  Description of Artificial Sequence: Synthetic oligonucleotide
ttatcttccagatagtagattctat

SEQ ID NO: 2817 - DNA, 25 bp, Artificial Sequence
  Description of Artificial Sequence: Synthetic oligonucleotide
aaatccttcatttatcttccagata

SEQ ID NO: 2818 - DNA, 25 bp, Artificial Sequence
  Description of Artificial Sequence: Synthetic oligonucleotide
aagagttctgattcccagaaggtaa

SEQ ID NO: 2819 - DNA, 25 bp, Artificial Sequence
  Description of Artificial Sequence: Synthetic oligonucleotide
attaaccaagttgcataaagagttc

SEQ ID NO: 2820 - DNA, 25 bp, Artificial Sequence
  Description of Artificial Sequence: Synthetic oligonucleotide
gatagtagattctattaaccaagtt

SEQ ID NO: 2821 - DNA, 25 bp, Artificial Sequence
  Description of Artificial Sequence: Synthetic oligonucleotide
accaagttgcataaagagttctgat

SEQ ID NO: 2822 - DNA, 25 bp, Artificial Sequence
  Description of Artificial Sequence: Synthetic oligonucleotide
gttgcataaagagttctgattccca

SEQ ID NO: 2823 - DNA, 25 bp, Artificial Sequence
  Description of Artificial Sequence: Synthetic oligonucleotide
acacttgacttctcaggaaacaaaa

SEQ ID NO: 2824 - DNA, 25 bp, Artificial Sequence
  Description of Artificial Sequence: Synthetic oligonucleotide
acaaaaagctaactccgggtgtggg

SEQ ID NO: 2825 - DNA, 25 bp, Artificial Sequence
  Description of Artificial Sequence: Synthetic oligonucleotide
tcaagtgactgaactggcctttgct

SEQ ID NO: 2826 - DNA, 25 bp, Artificial Sequence
  Description of Artificial Sequence: Synthetic oligonucleotide
atgctgataaaaataccagtgttat

SEQ ID NO: 2827 - DNA, 25 bp, Artificial Sequence
  Description of Artificial Sequence: Synthetic oligonucleotide
gtaaattgagaatcctgtggctggc

SEQ ID NO: 2828 - DNA, 25 bp, Artificial Sequence
  Description of Artificial Sequence: Synthetic oligonucleotide
taaacacttgacttctcaggaaaca

SEQ ID NO: 2829 - DNA, 25 bp, Artificial Sequence
  Description of Artificial Sequence: Synthetic oligonucleotide
gggtaaattgagaatcctgtggctg

SEQ ID NO: 2830 - DNA, 25 bp, Artificial Sequence
  Description of Artificial Sequence: Synthetic oligonucleotide
ataccagtgttattaccgtatgtaa

SEQ ID NO: 2831 - DNA, 25 bp, Artificial Sequence
  Description of Artificial Sequence: Synthetic oligonucleotide
accgtatgtaaatcttgtgtcattt

SEQ ID NO: 2832 - DNA, 25 bp, Artificial Sequence
  Description of Artificial Sequence: Synthetic oligonucleotide
actgaactggcctttgcttaaacac

SEQ ID NO: 2833 - DNA, 25 bp, Artificial Sequence
  Description of Artificial Sequence: Synthetic oligonucleotide
aaacaaaaagctaactccgggtgtg

SEQ ID NO: 2834 - DNA, 25 bp, Artificial Sequence
  Description of Artificial Sequence: Synthetic oligonucleotide
gaaatcctatgcctagaaaccaatt

SEQ ID NO: 2835 - DNA, 25 bp, Artificial Sequence
  Description of Artificial Sequence: Synthetic oligonucleotide
gattaaagtatatgcctcagaggga

SEQ ID NO: 2836 - DNA, 25 bp, Artificial Sequence
  Description of Artificial Sequence: Synthetic oligonucleotide
ttctagttgtggaatccttggcaag

SEQ ID NO: 2837 - DNA, 25 bp, Artificial Sequence
  Description of Artificial Sequence: Synthetic oligonucleotide
attattcccatctgttattaaagag

SEQ ID NO: 2838 - DNA, 25 bp, Artificial Sequence
  Description of Artificial Sequence: Synthetic oligonucleotide
gggaaggcctaatctttgtaactta

SEQ ID NO: 2839 - DNA, 25 bp, Artificial Sequence
  Description of Artificial Sequence: Synthetic oligonucleotide
acatgactgctatttagggaaggcc

SEQ ID NO: 2840 - DNA, 25 bp, Artificial Sequence
  Description of Artificial Sequence: Synthetic oligonucleotide
gcctctgtcacttctagttgtggaa

SEQ ID NO: 2841 - DNA, 25 bp, Artificial Sequence
  Description of Artificial Sequence: Synthetic oligonucleotide
actctttatgccattgagttattat

SEQ ID NO: 2842 - DNA, 25 bp, Artificial Sequence
  Description of Artificial Sequence: Synthetic oligonucleotide
tggcaagtgtcttaaactctttatg

SEQ ID NO: 2843 - DNA, 25 bp, Artificial Sequence
  Description of Artificial Sequence: Synthetic oligonucleotide
gcctcagagggatgtttgagtgtaa

SEQ ID NO: 2844 - DNA, 25 bp, Artificial Sequence
  Description of Artificial Sequence: Synthetic oligonucleotide
caaagtgattgacagagtgggctct

SEQ ID NO: 2845 - DNA, 25 bp, Artificial Sequence
  Description of Artificial Sequence: Synthetic oligonucleotide
tcaagaggtacagcggcatcctgtg

SEQ ID NO: 2846 - DNA, 25 bp, Artificial Sequence
  Description of Artificial Sequence: Synthetic oligonucleotide
ttgttggaacgggacgttgctcctt

SEQ ID NO: 2847 - DNA, 25 bp, Artificial Sequence
  Description of Artificial Sequence: Synthetic oligonucleotide
cccggacagcgtactttgaggactc

SEQ ID NO: 2848 - DNA, 25 bp, Artificial Sequence
  Description of Artificial Sequence: Synthetic oligonucleotide
gcctgggcaccgcaggaagactgca

SEQ ID NO: 2849 - DNA, 25 bp, Artificial Sequence
  Description of Artificial Sequence: Synthetic oligonucleotide
aactttgccattgttggaacgggac

SEQ ID NO: 2850 - DNA, 25 bp, Artificial Sequence
  Description of Artificial Sequence: Synthetic oligonucleotide
gaagctgattctgtacagcgggaca

SEQ ID NO: 2851 - DNA, 25 bp, Artificial Sequence
  Description of Artificial Sequence: Synthetic oligonucleotide
gcactttcaagaggtacagcggcat

SEQ ID NO: 2852 - DNA, 25 bp, Artificial Sequence
  Description of Artificial Sequence: Synthetic oligonucleotide
ccgtagctgaagctgattctgtaca

SEQ ID NO: 2853 - DNA, 25 bp, Artificial Sequence
  Description of Artificial Sequence: Synthetic oligonucleotide
gaagactgcacagaaactttgccat

SEQ ID NO: 2854 - DNA, 25 bp, Artificial Sequence
  Description of Artificial Sequence: Synthetic oligonucleotide
aacagagccaatgagcagcagtgaa

SEQ ID NO: 2855 - DNA, 25 bp, Artificial Sequence
  Description of Artificial Sequence: Synthetic oligonucleotide
atctcaagccagttcagatgttgct

SEQ ID NO: 2856 - DNA, 25 bp, Artificial Sequence
  Description of Artificial Sequence: Synthetic oligonucleotide
gaaacagcttcaacgacagccgacg

SEQ ID NO: 2857 - DNA, 25 bp, Artificial Sequence
  Description of Artificial Sequence: Synthetic oligonucleotide
caggaatgcaacaagctacagccta

SEQ ID NO: 2858 - DNA, 25 bp, Artificial Sequence
  Description of Artificial Sequence: Synthetic oligonucleotide
gacagccgacgggtctttaaacaat

SEQ ID NO: 2859 - DNA, 25 bp, Artificial Sequence
  Description of Artificial Sequence: Synthetic oligonucleotide
gagcagtagtttcagcccacgacca

SEQ ID NO: 2860 - DNA, 25 bp, Artificial Sequence
  Description of Artificial Sequence: Synthetic oligonucleotide
tcaggttcagcaattgggagcagta

SEQ ID NO: 2861 - DNA, 25 bp, Artificial Sequence
  Description of Artificial Sequence: Synthetic oligonucleotide
gcaattgggagcagtagtttcagcc

SEQ ID NO: 2862 - DNA, 25 bp, Artificial Sequence
  Description of Artificial Sequence: Synthetic oligonucleotide
atggctgcatatgggcaaacacagt

SEQ ID NO: 2863 - DNA, 25 bp, Artificial Sequence
  Description of Artificial Sequence: Synthetic oligonucleotide
cttcctcacaaactatggctgcata

SEQ ID NO: 2864 - DNA, 25 bp, Artificial Sequence
  Description of Artificial Sequence: Synthetic oligonucleotide
cagcagtgaaacagcttcaacgaca

SEQ ID NO: 2865 - DNA, 25 bp, Artificial Sequence
  Description of Artificial Sequence: Synthetic oligonucleotide
aagtctgtgacccgtgggagttgct

SEQ ID NO: 2866 - DNA, 25 bp, Artificial Sequence
  Description of Artificial Sequence: Synthetic oligonucleotide
ctctgtggccctcggaatgtgtaaa

SEQ ID NO: 2867 - DNA, 25 bp, Artificial Sequence
  Description of Artificial Sequence: Synthetic oligonucleotide
tgtggccctcggaatgtgtaaaaga

SEQ ID NO: 2868 - DNA, 25 bp, Artificial Sequence
  Description of Artificial Sequence: Synthetic oligonucleotide
gctgctggttttgcaactgagtgct

SEQ ID NO: 2869 - DNA, 25 bp, Artificial Sequence
  Description of Artificial Sequence: Synthetic oligonucleotide
gttttgcaactgagtgctgacggct

SEQ ID NO: 2870 - DNA, 25 bp, Artificial Sequence
  Description of Artificial Sequence: Synthetic oligonucleotide
gcaactgagtgctgacggcttattt

SEQ ID NO: 2871 - DNA, 25 bp, Artificial Sequence
  Description of Artificial Sequence: Synthetic oligonucleotide
agtgctgacggcttatttcttgtta

SEQ ID NO: 2872 - DNA, 25 bp, Artificial Sequence
  Description of Artificial Sequence: Synthetic oligonucleotide
gtcaaaagtgtcttagcgatgctct

SEQ ID NO: 2873 - DNA, 25 bp, Artificial Sequence
  Description of Artificial Sequence: Synthetic oligonucleotide
aagtgtcttagcgatgctcttcagc

SEQ ID NO: 2874 - DNA, 25 bp, Artificial Sequence
  Description of Artificial Sequence: Synthetic oligonucleotide
ttagcgatgctcttcagcccttcat

SEQ ID NO: 2875 - DNA, 25 bp, Artificial Sequence
  Description of Artificial Sequence: Synthetic oligonucleotide
agtggattcttcatcagctatttta

SEQ ID NO: 2876 - DNA, 25 bp, Artificial Sequence
  Description of Artificial Sequence: Synthetic oligonucleotide
gggactatgtcctagatactccttg

SEQ ID NO: 2877 - DNA, 25 bp, Artificial Sequence
  Description of Artificial Sequence: Synthetic oligonucleotide
ggactatgtcctagatactccttga

SEQ ID NO: 2878 - DNA, 25 bp, Artificial Sequence
  Description of Artificial Sequence: Synthetic oligonucleotide
tctggggactatgtcctagatactc

SEQ ID NO: 2879 - DNA, 25 bp, Artificial Sequence
  Description of Artificial Sequence: Synthetic oligonucleotide
tatgtcctagatactccttgaattt

SEQ ID NO: 2880 - DNA, 25 bp, Artificial Sequence
  Description of Artificial Sequence: Synthetic oligonucleotide
tcttctggggactatgtcctagata

SEQ ID NO: 2881 - DNA, 25 bp, Artificial Sequence
  Description of Artificial Sequence: Synthetic oligonucleotide
cttctggggactatgtcctagatac

SEQ ID NO: 2882 - DNA, 25 bp, Artificial Sequence
  Description of Artificial Sequence: Synthetic oligonucleotide
gactatgtcctagatactccttgaa

SEQ ID NO: 2883 - DNA, 25 bp, Artificial Sequence
  Description of Artificial Sequence: Synthetic oligonucleotide
ctatgtcctagatactccttgaatt

SEQ ID NO: 2884 - DNA, 25 bp, Artificial Sequence
  Description of Artificial Sequence: Synthetic oligonucleotide
actatgtcctagatactccttgaat

SEQ ID NO: 2885 - DNA, 25 bp, Artificial Sequence
  Description of Artificial Sequence: Synthetic oligonucleotide
tggggactatgtcctagatactcct

SEQ ID NO: 2886 - DNA, 25 bp, Artificial Sequence
  Description of Artificial Sequence: Synthetic oligonucleotide
ttctggggactatgtcctagatact

SEQ ID NO: 2887 - DNA, 25 bp, Artificial Sequence
  Description of Artificial Sequence: Synthetic oligonucleotide
atggaatattcttctgacgcagata

SEQ ID NO: 2888 - DNA, 25 bp, Artificial Sequence
  Description of Artificial Sequence: Synthetic oligonucleotide
caggtcttctatgcagcgcttgatg

SEQ ID NO: 2889 - DNA, 25 bp, Artificial Sequence
  Description of Artificial Sequence: Synthetic oligonucleotide
aatctgcgggagtcttcattttctt

SEQ ID NO: 2890 - DNA, 25 bp, Artificial Sequence
  Description of Artificial Sequence: Synthetic oligonucleotide
acaagaagggtccatggttacccat

SEQ ID NO: 2891 - DNA, 25 bp, Artificial Sequence
  Description of Artificial Sequence: Synthetic oligonucleotide
tctgggccgagcatacaggctgctg

SEQ ID NO: 2892 - DNA, 25 bp, Artificial Sequence
  Description of Artificial Sequence: Synthetic oligonucleotide
atgttgcctgtccttcggtattttt

SEQ ID NO: 2893 - DNA, 25 bp, Artificial Sequence
  Description of Artificial Sequence: Synthetic oligonucleotide
tttcatgtatcgcaccatcactcgt

SEQ ID NO: 2894 - DNA, 25 bp, Artificial Sequence
  Description of Artificial Sequence: Synthetic oligonucleotide
cttccctcgctttcagttgtcattt

SEQ ID NO: 2895 - DNA, 25 bp, Artificial Sequence
  Description of Artificial Sequence: Synthetic oligonucleotide
ttgatgtaatggcagctcctctcat

SEQ ID NO: 2896 - DNA, 25 bp, Artificial Sequence
  Description of Artificial Sequence: Synthetic oligonucleotide
atggttacccatgagaccgggactc

SEQ ID NO: 2897 - DNA, 25 bp, Artificial Sequence
  Description of Artificial Sequence: Synthetic oligonucleotide
gtccttcggtatttttccatgctgg

SEQ ID NO: 2898 - DNA, 25 bp, Artificial Sequence
  Description of Artificial Sequence: Synthetic oligonucleotide
gaatgatctgtgaatcaagcagctc

SEQ ID NO: 2899 - DNA, 25 bp, Artificial Sequence
  Description of Artificial Sequence: Synthetic oligonucleotide
gatctgtgaatcaagcagctcctag

SEQ ID NO: 2900 - DNA, 25 bp, Artificial Sequence
  Description of Artificial Sequence: Synthetic oligonucleotide
atcaagcagctcctagaaccaaaat

SEQ ID NO: 2901 - DNA, 25 bp, Artificial Sequence
  Description of Artificial Sequence: Synthetic oligonucleotide
agaaccaaaataggttcagagccgc

SEQ ID NO: 2902 - DNA, 25 bp, Artificial Sequence
  Description of Artificial Sequence: Synthetic oligonucleotide
tttgtcaacacgcagagcaagttgg

SEQ ID NO: 2903 - DNA, 25 bp, Artificial Sequence
  Description of Artificial Sequence: Synthetic oligonucleotide
gcagagcaagttggctacctccctt

SEQ ID NO: 2904 - DNA, 25 bp, Artificial Sequence
  Description of Artificial Sequence: Synthetic oligonucleotide
agttggctacctcccttcatatgct

SEQ ID NO: 2905 - DNA, 25 bp, Artificial Sequence
  Description of Artificial Sequence: Synthetic oligonucleotide
ccttcatatgctcgcctcatagtat

SEQ ID NO: 2906 - DNA, 25 bp, Artificial Sequence
  Description of Artificial Sequence: Synthetic oligonucleotide
catatgctcgcctcatagtattcaa

SEQ ID NO: 2907 - DNA, 25 bp, Artificial Sequence
  Description of Artificial Sequence: Synthetic oligonucleotide
gctcgcctcatagtattcaaagaca

SEQ ID NO: 2908 - DNA, 25 bp, Artificial Sequence
  Description of Artificial Sequence: Synthetic oligonucleotide
attcaaagacagctatcatggccac

SEQ ID NO: 2909 - DNA, 25 bp, Artificial Sequence
  Description of Artificial Sequence: Synthetic oligonucleotide
gaatgatctgtgaatcaagcagctc

SEQ ID NO: 2910 - DNA, 25 bp, Artificial Sequence
  Description of Artificial Sequence: Synthetic oligonucleotide
gatctgtgaatcaagcagctcctag

SEQ ID NO: 2911 - DNA, 25 bp, Artificial Sequence
  Description of Artificial Sequence: Synthetic oligonucleotide
atcaagcagctcctagaaccaaaat

SEQ ID NO: 2912 - DNA, 25 bp, Artificial Sequence
  Description of Artificial Sequence: Synthetic oligonucleotide
caaaataggttcagagccgctctcc

SEQ ID NO: 2913 - DNA, 25 bp, Artificial Sequence
  Description of Artificial Sequence: Synthetic oligonucleotide
tttgtcaacacgcagagcaagttgg

SEQ ID NO: 2914 - DNA, 25 bp, Artificial Sequence
  Description of Artificial Sequence: Synthetic oligonucleotide
gcagagcaagttggctacctccctt

SEQ ID NO: 2915 - DNA, 25 bp, Artificial Sequence
  Description of Artificial Sequence: Synthetic oligonucleotide
agttggctacctcccttcatatgct

SEQ ID NO: 2916 - DNA, 25 bp, Artificial Sequence
  Description of Artificial Sequence: Synthetic oligonucleotide
catatgctcgcctcatagtattcaa

SEQ ID NO: 2917 - DNA, 25 bp, Artificial Sequence
  Description of Artificial Sequence: Synthetic oligonucleotide
gctcgcctcatagtattcaaagaca

SEQ ID NO: 2918 - DNA, 25 bp, Artificial Sequence
  Description of Artificial Sequence: Synthetic oligonucleotide
attcaaagacagctatcatggccac

SEQ ID NO: 2919 - DNA, 25 bp, Artificial Sequence
  Description of Artificial Sequence: Synthetic oligonucleotide
ggccacattaaatcttggtttcttt

SEQ ID NO: 2920 - DNA, 25 bp, Artificial Sequence
  Description of Artificial Sequence: Synthetic oligonucleotide
gccccaggcaccagaacatgatggg

SEQ ID NO: 2921 - DNA, 25 bp, Artificial Sequence
  Description of Artificial Sequence: Synthetic oligonucleotide
caaggccggctttgcaggtgacgat

SEQ ID NO: 2922 - DNA, 25 bp, Artificial Sequence
  Description of Artificial Sequence: Synthetic oligonucleotide
ataatgaaacatcagagccagctaa

SEQ ID NO: 2923 - DNA, 25 bp, Artificial Sequence
  Description of Artificial Sequence: Synthetic oligonucleotide
tcatgctaagactggaactagacat

SEQ ID NO: 2924 - DNA, 25 bp, Artificial Sequence
  Description of Artificial Sequence: Synthetic oligonucleotide
tgccccaggcaccagaacatgatgg

SEQ ID NO: 2925 - DNA, 25 bp, Artificial Sequence
  Description of Artificial Sequence: Synthetic oligonucleotide
tgccgtgctcgtcattgacaacggc

SEQ ID NO: 2926 - DNA, 25 bp, Artificial Sequence
  Description of Artificial Sequence: Synthetic oligonucleotide
atcttttaaagggtctacaactgaa

SEQ ID NO: 2927 - DNA, 25 bp, Artificial Sequence
  Description of Artificial Sequence: Synthetic oligonucleotide
aagggtctacaactgaatgagctca

SEQ ID NO: 2928 - DNA, 25 bp, Artificial Sequence
  Description of Artificial Sequence: Synthetic oligonucleotide
tggatgatgatactgccgtgctcgt

SEQ ID NO: 2929 - DNA, 25 bp, Artificial Sequence
  Description of Artificial Sequence: Synthetic oligonucleotide
caactgaatgagctcaccatggatg

SEQ ID NO: 2930 - DNA, 25 bp, Artificial Sequence
  Description of Artificial Sequence: Synthetic oligonucleotide
atactgccgtgctcgtcattgacaa

SEQ ID NO: 2931 - DNA, 25 bp, Artificial Sequence
  Description of Artificial Sequence: Synthetic oligonucleotide
agctggtggtgaacatctctgcaat

SEQ ID NO: 2932 - DNA, 25 bp, Artificial Sequence
  Description of Artificial Sequence: Synthetic oligonucleotide
gtttggctcttttgaataatcccag

SEQ ID NO: 2933 - DNA, 25 bp, Artificial Sequence
  Description of Artificial Sequence: Synthetic oligonucleotide
ggtgaacatctctgcaatgatcagt

SEQ ID NO: 2934 - DNA, 25 bp, Artificial Sequence
  Description of Artificial Sequence: Synthetic oligonucleotide
ggctcttttgaataatcccagtcag

SEQ ID NO: 2935 - DNA, 25 bp, Artificial Sequence
  Description of Artificial Sequence: Synthetic oligonucleotide
tctctcttcacctttcaagtttgtt

SEQ ID NO: 2936 - DNA, 25 bp, Artificial Sequence
  Description of Artificial Sequence: Synthetic oligonucleotide
agtcagctggtggtgaacatctctg

SEQ ID NO: 2937 - DNA, 25 bp, Artificial Sequence
  Description of Artificial Sequence: Synthetic oligonucleotide
ctttcttctcatgagtggagactcc

SEQ ID NO: 2938 - DNA, 25 bp, Artificial Sequence
  Description of Artificial Sequence: Synthetic oligonucleotide
tcagtgcaggtttcccaactgtcag

SEQ ID NO: 2939 - DNA, 25 bp, Artificial Sequence
  Description of Artificial Sequence: Synthetic oligonucleotide
ttttacactctctcttcacctttca

SEQ ID NO: 2940 - DNA, 25 bp, Artificial Sequence
  Description of Artificial Sequence: Synthetic oligonucleotide
caatgatcagtgcaggtttcccaac

SEQ ID NO: 2941 - DNA, 25 bp, Artificial Sequence
  Description of Artificial Sequence: Synthetic oligonucleotide
ataatcccagtcagctggtggtgaa

SEQ ID NO: 2942 - DNA, 25 bp, Artificial Sequence
  Description of Artificial Sequence: Synthetic oligonucleotide
tgcagattttgcaacgtggtactac

SEQ ID NO: 2943 - DNA, 25 bp, Artificial Sequence
  Description of Artificial Sequence: Synthetic oligonucleotide
gtccttctgtgtgcttatgtctctt

SEQ ID NO: 2944 - DNA, 25 bp, Artificial Sequence
  Description of Artificial Sequence: Synthetic oligonucleotide
tccttctgtgtgcttatgtctcttg

SEQ ID NO: 2945 - DNA, 25 bp, Artificial Sequence
  Description of Artificial Sequence: Synthetic oligonucleotide
tgtccttctgtgtgcttatgtctct

SEQ ID NO: 2946 - DNA, 25 bp, Artificial Sequence
  Description of Artificial Sequence: Synthetic oligonucleotide
ttgtgacaattgttttcctccctgc

SEQ ID NO: 2947 - DNA, 25 bp, Artificial Sequence
  Description of Artificial Sequence: Synthetic oligonucleotide
gcagattttgcaacgtggtactact

SEQ ID NO: 2948 - DNA, 25 bp, Artificial Sequence
  Description of Artificial Sequence: Synthetic oligonucleotide
tgtgacaattgttttcctccctgcc

SEQ ID NO: 2949 - DNA, 25 bp, Artificial Sequence
  Description of Artificial Sequence: Synthetic oligonucleotide
ttgcagattttgcaacgtggtacta

SEQ ID NO: 2950 - DNA, 25 bp, Artificial Sequence
  Description of Artificial Sequence: Synthetic oligonucleotide
cttgtgacaattgttttcctccctg

SEQ ID NO: 2951 - DNA, 25 bp, Artificial Sequence
  Description of Artificial Sequence: Synthetic oligonucleotide
cagattttgcaacgtggtactactt

SEQ ID NO: 2952 - DNA, 25 bp, Artificial Sequence
  Description of Artificial Sequence: Synthetic oligonucleotide
gtgatcaatgaaggagacatctgga

SEQ ID NO: 2953 - DNA, 25 bp, Artificial Sequence
  Description of Artificial Sequence: Synthetic oligonucleotide
caagagtaactctgacttaggaata

SEQ ID NO: 2954 - DNA, 25 bp, Artificial Sequence
  Description of Artificial Sequence: Synthetic oligonucleotide
aagttgcttgtctactgaaaaaaaa

SEQ ID NO: 2955 - DNA, 25 bp, Artificial Sequence
  Description of Artificial Sequence: Synthetic oligonucleotide
gatgggaaccttaatctttcttttc

SEQ ID NO: 2956 - DNA, 25 bp, Artificial Sequence
  Description of Artificial Sequence: Synthetic oligonucleotide
aaagttgcttgtctactgaaaaaaa

SEQ ID NO: 2957 - DNA, 25 bp, Artificial Sequence
  Description of Artificial Sequence: Synthetic oligonucleotide
ctaaaagttgcttgtctactgaaaa

SEQ ID NO: 2958 - DNA, 25 bp, Artificial Sequence
  Description of Artificial Sequence: Synthetic oligonucleotide
aaaagttgcttgtctactgaaaaaa

SEQ ID NO: 2959 - DNA, 25 bp, Artificial Sequence
  Description of Artificial Sequence: Synthetic oligonucleotide
agacatctggagtgtgcgtgcttct

SEQ ID NO: 2960 - DNA, 25 bp, Artificial Sequence
  Description of Artificial Sequence: Synthetic oligonucleotide
agtgtgcgtgcttcttcagagggac

SEQ ID NO: 2961 - DNA, 25 bp, Artificial Sequence
  Description of Artificial Sequence: Synthetic oligonucleotide
ctgacttaggaatagagacagccag

SEQ ID NO: 2962 - DNA, 25 bp, Artificial Sequence
  Description of Artificial Sequence: Synthetic oligonucleotide
taaaagttgcttgtctactgaaaaa

SEQ ID NO: 2963 - DNA, 25 bp, Artificial Sequence
  Description of Artificial Sequence: Synthetic oligonucleotide
tggtccacctggaactaaaagggat

SEQ ID NO: 2964 - DNA, 25 bp, Artificial Sequence
  Description of Artificial Sequence: Synthetic oligonucleotide
ttctaacaaggtatatctagtaggg

SEQ ID NO: 2965 - DNA, 25 bp, Artificial Sequence
  Description of Artificial Sequence: Synthetic oligonucleotide
tatatcaacctgtaaacatgtgcct

SEQ ID NO: 2966 - DNA, 25 bp, Artificial Sequence
  Description of Artificial Sequence: Synthetic oligonucleotide
taaacatgtgcctgtaacttacttc

SEQ ID NO: 2967 - DNA, 25 bp, Artificial Sequence
  Description of Artificial Sequence: Synthetic oligonucleotide
gagcaaggagaatataacatgtttg

SEQ ID NO: 2968 - DNA, 25 bp, Artificial Sequence
  Description of Artificial Sequence: Synthetic oligonucleotide
caattttattacctgcttaatggtc

SEQ ID NO: 2969 - DNA, 25 bp, Artificial Sequence
  Description of Artificial Sequence: Synthetic oligonucleotide
ttattacctgcttaatggtccacct

SEQ ID NO: 2970 - DNA, 25 bp, Artificial Sequence
  Description of Artificial Sequence: Synthetic oligonucleotide
tattttctaacaaggtatatctagt

SEQ ID NO: 2971 - DNA, 25 bp, Artificial Sequence
  Description of Artificial Sequence: Synthetic oligonucleotide
ttaatggtccacctggaactaaaag

SEQ ID NO: 2972 - DNA, 25 bp, Artificial Sequence
  Description of Artificial Sequence: Synthetic oligonucleotide
gtgttgcttgccttgtatagttgac

SEQ ID NO: 2973 - DNA, 25 bp, Artificial Sequence
  Description of Artificial Sequence: Synthetic oligonucleotide
actatacaacctgaaaactgtcatt

SEQ ID NO: 2974 - DNA, 25 bp, Artificial Sequence
  Description of Artificial Sequence: Synthetic oligonucleotide
gcagctatctcgttttcatgctaaa

SEQ ID NO: 2975 - DNA, 25 bp, Artificial Sequence
  Description of Artificial Sequence: Synthetic oligonucleotide
ttattgtcatgtgttgcttgccttg

SEQ ID NO: 2976 - DNA, 25 bp, Artificial Sequence
  Description of Artificial Sequence: Synthetic oligonucleotide
gcttgccttgtatagttgacttcat

SEQ ID NO: 2977 - DNA, 25 bp, Artificial Sequence
  Description of Artificial Sequence: Synthetic oligonucleotide
ataactatacaacctgaaaactgtc

SEQ ID NO: 2978 - DNA, 25 bp, Artificial Sequence
  Description of Artificial Sequence: Synthetic oligonucleotide
cttcattgtctggataactatacaa

SEQ ID NO: 2979 - DNA, 25 bp, Artificial Sequence
  Description of Artificial Sequence: Synthetic oligonucleotide
attgtcatgtgttgcttgccttgta

SEQ ID NO: 2980 - DNA, 25 bp, Artificial Sequence
  Description of Artificial Sequence: Synthetic oligonucleotide
tctcgttttcatgctaaaatagttt

SEQ ID NO: 2981 - DNA, 25 bp, Artificial Sequence
  Description of Artificial Sequence: Synthetic oligonucleotide
gtctattgcagctatctcgttttca

SEQ ID NO: 2982 - DNA, 25 bp, Artificial Sequence
  Description of Artificial Sequence: Synthetic oligonucleotide
ctattgcagctatctcgttttcatg

SEQ ID NO: 2983 - DNA, 25 bp, Artificial Sequence
  Description of Artificial Sequence: Synthetic oligonucleotide
cattaggtgaaatcgcaaaaaatat

SEQ ID NO: 2984 - DNA, 25 bp, Artificial Sequence
  Description of Artificial Sequence: Synthetic oligonucleotide
atagtattccagctattgtgcaata

SEQ ID NO: 2985 - DNA, 25 bp, Artificial Sequence
  Description of Artificial Sequence: Synthetic oligonucleotide
atctgtggctaattctgttggtcgt

SEQ ID NO: 2986 - DNA, 25 bp, Artificial Sequence
  Description of Artificial Sequence: Synthetic oligonucleotide
attaaaatttcggtcatgttttaga

SEQ ID NO: 2987 - DNA, 25 bp, Artificial Sequence
  Description of Artificial Sequence: Synthetic oligonucleotide
ttctcagagtattatttggaacggc

SEQ ID NO: 2988 - DNA, 25 bp, Artificial Sequence
  Description of Artificial Sequence: Synthetic oligonucleotide
tatttggaacggcatgaaaaattaa

SEQ ID NO: 2989 - DNA, 25 bp, Artificial Sequence
  Description of Artificial Sequence: Synthetic oligonucleotide
ggctaattctgttggtcgtttgtat

SEQ ID NO: 2990 - DNA, 25 bp, Artificial Sequence
  Description of Artificial Sequence: Synthetic oligonucleotide
aaatctgtggctaattctgttggtc

SEQ ID NO: 2991 - DNA, 25 bp, Artificial Sequence
  Description of Artificial Sequence: Synthetic oligonucleotide
attctgttggtcgtttgtattataa

SEQ ID NO: 2992 - DNA, 25 bp, Artificial Sequence
  Description of Artificial Sequence: Synthetic oligonucleotide
gtattccagctattgtgcaatatgt

SEQ ID NO: 2993 - DNA, 25 bp, Artificial Sequence
  Description of Artificial Sequence: Synthetic oligonucleotide
cactgttaaattctcagagtattat

SEQ ID NO: 2994 - DNA, 25 bp, Artificial Sequence
  Description of Artificial Sequence: Synthetic oligonucleotide
gataataaaagttgctgacttaaaa

SEQ ID NO: 2995 - DNA, 25 bp, Artificial Sequence
  Description of Artificial Sequence: Synthetic oligonucleotide
agccctgctcgaagatatagaaaga

SEQ ID NO: 2996 - DNA, 25 bp, Artificial Sequence
  Description of Artificial Sequence: Synthetic oligonucleotide
cagccctgctcgaagatatagaaag

SEQ ID NO: 2997 - DNA, 25 bp, Artificial Sequence
  Description of Artificial Sequence: Synthetic oligonucleotide
ggacagccctgctcgaagatataga

SEQ ID NO: 2998 - DNA, 25 bp, Artificial Sequence
  Description of Artificial Sequence: Synthetic oligonucleotide
tagaaagagtgacctgcacaaactt

SEQ ID NO: 2999 - DNA, 25 bp, Artificial Sequence
  Description of Artificial Sequence: Synthetic oligonucleotide
gacagccctgctcgaagatatagaa

SEQ ID NO: 3000 - DNA, 25 bp, Artificial Sequence
  Description of Artificial Sequence: Synthetic oligonucleotide
cggacagccctgctcgaagatatag

SEQ ID NO: 3001 - DNA, 25 bp, Artificial Sequence
  Description of Artificial Sequence: Synthetic oligonucleotide
ataataaaagttgctgacttaaaaa

SEQ ID NO: 3002 - DNA, 25 bp, Artificial Sequence
  Description of Artificial Sequence: Synthetic oligonucleotide
acagccctgctcgaagatatagaaa

SEQ ID NO: 3003 - DNA, 25 bp, Artificial Sequence
  Description of Artificial Sequence: Synthetic oligonucleotide
agaaagagtgacctgcacaaacttg

SEQ ID NO: 3004 - DNA, 25 bp, Artificial Sequence
  Description of Artificial Sequence: Synthetic oligonucleotide
ttttttccatacaaccctgacccat

SEQ ID NO: 3005 - DNA, 25 bp, Artificial Sequence
  Description of Artificial Sequence: Synthetic oligonucleotide
agccctgctcgaagatatagaaaga

SEQ ID NO: 3006 - DNA, 25 bp, Artificial Sequence
  Description of Artificial Sequence: Synthetic oligonucleotide
cggacagccctgctcgaagatatag

SEQ ID NO: 3007 - DNA, 25 bp, Artificial Sequence
  Description of Artificial Sequence: Synthetic oligonucleotide
tgatgtccggacagccctgctcgaa

SEQ ID NO: 3008 - DNA, 25 bp, Artificial Sequence
  Description of Artificial Sequence: Synthetic oligonucleotide
gacagccctgctcgaagatatagaa

SEQ ID NO: 3009 - DNA, 25 bp, Artificial Sequence
  Description of Artificial Sequence: Synthetic oligonucleotide
agaaagagtgacctgcacaaacttg

SEQ ID NO: 3010 - DNA, 25 bp, Artificial Sequence
  Description of Artificial Sequence: Synthetic oligonucleotide
acaaccctgacccatttactgtatt

SEQ ID NO: 3011 - DNA, 25 bp, Artificial Sequence
  Description of Artificial Sequence: Synthetic oligonucleotide
tgaatgataataaaagttgctgact

SEQ ID NO: 3012 - DNA, 25 bp, Artificial Sequence
  Description of Artificial Sequence: Synthetic oligonucleotide
aagagtgacctgcacaaacttggaa

SEQ ID NO: 3013 - DNA, 25 bp, Artificial Sequence
  Description of Artificial Sequence: Synthetic oligonucleotide
agatatagaaagagtgacctgcaca

SEQ ID NO: 3014 - DNA, 25 bp, Artificial Sequence
  Description of Artificial Sequence: Synthetic oligonucleotide
tgacctgcacaaacttggaattttt

SEQ ID NO: 3015 - DNA, 25 bp, Artificial Sequence
  Description of Artificial Sequence: Synthetic oligonucleotide
gtccagaagaatacagttcatgcca

SEQ ID NO: 3016 - DNA, 23 bp, Artificial Sequence
  Description of Artificial Sequence: Synthetic oligonucleotide
tctggtccaacctcaagtatcgc

SEQ ID NO: 3017 - DNA, 21 bp, Artificial Sequence
  Description of Artificial Sequence: Synthetic oligonucleotide
gctacactggtttccctgctc

SEQ ID NO: 3018 - DNA, 22 bp, Artificial Sequence
  Description of Artificial Sequence: Synthetic oligonucleotide
ctggctcctgcaaatgcaaaga

SEQ ID NO: 3019 - DNA, 24 bp, Artificial Sequence
  Description of Artificial Sequence: Synthetic oligonucleotide
cctcagacaatccatgtgcttctc

SEQ ID NO: 3020 - DNA, 25 bp, Artificial Sequence
  Description of Artificial Sequence: Synthetic oligonucleotide
ggatggaccaatatcaaggtgtcag

SEQ ID NO: 3021 - DNA, 25 bp, Artificial Sequence
  Description of Artificial Sequence: Synthetic oligonucleotide
aagccaacaaccatactatggagtg

SEQ ID NO: 3022 - DNA, 22 bp, Artificial Sequence
  Description of Artificial Sequence: Synthetic oligonucleotide
cagagaagaggggctcttacgg

SEQ ID NO: 3023 - DNA, 19 bp, Artificial Sequence
  Description of Artificial Sequence: Synthetic oligonucleotide
gcgggactgagctgttgag

SEQ ID NO: 3024 - DNA, 25 bp, Artificial Sequence
  Description of Artificial Sequence: Synthetic oligonucleotide
gcggatctcaacatcaagaactgtg

SEQ ID NO: 3025 - DNA, 22 bp, Artificial Sequence
  Description of Artificial Sequence: Synthetic oligonucleotide
tggacaaccagtcttcctggag

SEQ ID NO: 3026 - DNA, 21 bp, Artificial Sequence
  Description of Artificial Sequence: Synthetic oligonucleotide
tccccaaaattttaaactttc

SEQ ID NO: 3027 - DNA, 19 bp, Artificial Sequence
  Description of Artificial Sequence: Synthetic oligonucleotide
gcaaggctgacctgtcagg

SEQ ID NO: 3028 - DNA, 21 bp, Artificial Sequence
  Description of Artificial Sequence: Synthetic oligonucleotide
ggacaacgagaagcccacatg

SEQ ID NO: 3029 - DNA, 18 bp, Artificial Sequence
  Description of Artificial Sequence: Synthetic oligonucleotide
ctgctggagggcgaggaa

SEQ ID NO: 3030 - DNA, 25 bp, Artificial Sequence
  Description of Artificial Sequence: Synthetic oligonucleotide
tgtcgcaggcattactaatctgaaa

SEQ ID NO: 3031 - DNA, 25 bp, Artificial Sequence
  Description of Artificial Sequence: Synthetic oligonucleotide
ccacctaagcctacaaaatcagttg

SEQ ID NO: 3032 - DNA, 19 bp, Artificial Sequence
  Description of Artificial Sequence: Synthetic oligonucleotide
cctgtgtccgtcctgtgtc

SEQ ID NO: 3033 - DNA, 21 bp, Artificial Sequence
  Description of Artificial Sequence: Synthetic oligonucleotide
cctcatggccaaccgttacac

SEQ ID NO: 3034 - DNA, 19 bp, Artificial Sequence
  Description of Artificial Sequence: Synthetic oligonucleotide
actccttcggcagtccacc

SEQ ID NO: 3035 - DNA, 24 bp, Artificial Sequence
  Description of Artificial Sequence: Synthetic oligonucleotide
gaagcacaaaaggaagcacagaga

SEQ ID NO: 3036 - DNA, 25 bp, Artificial Sequence
  Description of Artificial Sequence: Synthetic oligonucleotide
ggagtcttctgtctgctgtttcaaa

SEQ ID NO: 3037 - DNA, 23 bp, Artificial Sequence
  Description of Artificial Sequence: Synthetic oligonucleotide
gagtgcctctcatgatccttgac

SEQ ID NO: 3038 - DNA, 25 bp, Artificial Sequence
  Description of Artificial Sequence: Synthetic oligonucleotide
agcagattctgtcaaccacatttca

SEQ ID NO: 3039 - DNA, 24 bp, Artificial Sequence
  Description of Artificial Sequence: Synthetic oligonucleotide
gactccacctaatcctaagcatgc

SEQ ID NO: 3040 - DNA, 24 bp, Artificial Sequence
  Description of Artificial Sequence: Synthetic oligonucleotide
gccatctgttagcaatgcagtcaa

SEQ ID NO: 3041 - DNA, 20 bp, Artificial Sequence
  Description of Artificial Sequence: Synthetic oligonucleotide
tctgggaggagagcttgacc

SEQ ID NO: 3042 - DNA, 23 bp, Artificial Sequence
  Description of Artificial Sequence: Synthetic oligonucleotide
atgggcagaaagcttgtctcaac

SEQ ID NO: 3043 - DNA, 19 bp, Artificial Sequence
  Description of Artificial Sequence: Synthetic oligonucleotide
cgaccgcagctacgacaag

SEQ ID NO: 3044 - DNA, 25 bp, Artificial Sequence
  Description of Artificial Sequence: Synthetic oligonucleotide
tggtgtagaagaagaacaaggagca

SEQ ID NO: 3045 - DNA, 23 bp, Artificial Sequence
  Description of Artificial Sequence: Synthetic oligonucleotide
gtgtccaaccattgctgaatcca

SEQ ID NO: 3046 - DNA, 19 bp, Artificial Sequence
  Description of Artificial Sequence: Synthetic oligonucleotide
gctgggaaccttagctggg

SEQ ID NO: 3047 - DNA, 18 bp, Artificial Sequence
  Description of Artificial Sequence: Synthetic oligonucleotide
acacctacgcccacctca

SEQ ID NO: 3048 - DNA, 19 bp, Artificial Sequence
  Description of Artificial Sequence: Synthetic oligonucleotide
gtgcagctaccgcctagtg

SEQ ID NO: 3049 - DNA, 22 bp, Artificial Sequence
  Description of Artificial Sequence: Synthetic oligonucleotide
gccatgagaacttcctaccttc

SEQ ID NO: 3050 - DNA, 19 bp, Artificial Sequence
  Description of Artificial Sequence: Synthetic oligonucleotide
actggctggaacctcatcc

SEQ ID NO: 3051 - DNA, 21 bp, Artificial Sequence
  Description of Artificial Sequence: Synthetic oligonucleotide
tcattttggcattgtgcagag

SEQ ID NO: 3052 - DNA, 19 bp, Artificial Sequence
  Description of Artificial Sequence: Synthetic oligonucleotide
aggtccctcggtttctgca

SEQ ID NO: 3053 - DNA, 20 bp, Artificial Sequence
  Description of Artificial Sequence: Synthetic oligonucleotide
tgagactcgccaacattctg

SEQ ID NO: 3054 - DNA, 23 bp, Artificial Sequence
  Description of Artificial Sequence: Synthetic oligonucleotide
ccctgctcttactccaaaaagat

SEQ ID NO: 3055 - DNA, 21 bp, Artificial Sequence
  Description of Artificial Sequence: Synthetic oligonucleotide
aaggcacctctgagaacttca

SEQ ID NO: 3056 - DNA, 22 bp, Artificial Sequence
  Description of Artificial Sequence: Synthetic oligonucleotide
tgagtgtaagagaatcgtgctg

SEQ ID NO: 3057 - DNA, 25 bp, Artificial Sequence
  Description of Artificial Sequence: Synthetic oligonucleotide
cactgtgggaaatgctatgagaagc

SEQ ID NO: 3058 - DNA, 21 bp, Artificial Sequence
  Description of Artificial Sequence: Synthetic oligonucleotide
ttaagcacatcctcttccgac

SEQ ID NO: 3059 - DNA, 20 bp, Artificial Sequence
  Description of Artificial Sequence: Synthetic oligonucleotide
ggtaagaatggtgcctgtcc

SEQ ID NO: 3060 - DNA, 18 bp, Artificial Sequence
  Description of Artificial Sequence: Synthetic oligonucleotide
acacatgaccggaacacc

SEQ ID NO: 3061 - DNA, 21 bp, Artificial Sequence
  Description of Artificial Sequence: Synthetic oligonucleotide
cctcacaccactgttacttgg

SEQ ID NO: 3062 - DNA, 20 bp, Artificial Sequence
  Description of Artificial Sequence: Synthetic oligonucleotide
tggagggcgtacaagaacat

SEQ ID NO: 3063 - DNA, 20 bp, Artificial Sequence
  Description of Artificial Sequence: Synthetic oligonucleotide
ccctatgaccccagtcaatg

SEQ ID NO: 3064 - DNA, 19 bp, Artificial Sequence
  Description of Artificial Sequence: Synthetic oligonucleotide
ggcaccttctgcaaacatg

SEQ ID NO: 3065 - DNA, 23 bp, Artificial Sequence
  Description of Artificial Sequence: Synthetic oligonucleotide
acgtgatgctggagaattatagg

SEQ ID NO: 3066 - DNA, 22 bp, Artificial Sequence
  Description of Artificial Sequence: Synthetic oligonucleotide
ttcgacgaacactacgagtacc

SEQ ID NO: 3067 - DNA, 18 bp, Artificial Sequence
  Description of Artificial Sequence: Synthetic oligonucleotide
gccaagggaaggaagagc

SEQ ID NO: 3068 - DNA, 20 bp, Artificial Sequence
  Description of Artificial Sequence: Synthetic oligonucleotide
gccatgtccctatcagatgc

SEQ ID NO: 3069 - DNA, 19 bp, Artificial Sequence
  Description of Artificial Sequence: Synthetic oligonucleotide
agactggtgtgctgcacct

SEQ ID NO: 3070 - DNA, 19 bp, Artificial Sequence
  Description of Artificial Sequence: Synthetic oligonucleotide
gatgcgccaggcttcttac

SEQ ID NO: 3071 - DNA, 21 bp, Artificial Sequence
  Description of Artificial Sequence: Synthetic oligonucleotide
tgaatgatcccgctacagatg

SEQ ID NO: 3072 - DNA, 19 bp, Artificial Sequence
  Description of Artificial Sequence: Synthetic oligonucleotide
aagtgtgacaagttccccg

SEQ ID NO: 3073 - DNA, 20 bp, Artificial Sequence
  Description of Artificial Sequence: Synthetic oligonucleotide
atatcctgagtgttgcgtgg

SEQ ID NO: 3074 - DNA, 20 bp, Artificial Sequence
  Description of Artificial Sequence: Synthetic oligonucleotide
ttctggcttcacaacctctg

SEQ ID NO: 3075 - DNA, 18 bp, Artificial Sequence
  Description of Artificial Sequence: Synthetic oligonucleotide
ttgctgggatggcagttc

SEQ ID NO: 3076 - DNA, 16 bp, Artificial Sequence
  Description of Artificial Sequence: Synthetic oligonucleotide
atgcgagccagcgtct

SEQ ID NO: 3077 - DNA, 20 bp, Artificial Sequence
  Description of Artificial Sequence: Synthetic oligonucleotide
aagggcgtgtttcgatactg

SEQ ID NO: 3078 - DNA, 26 bp, Artificial Sequence
  Description of Artificial Sequence: Synthetic oligonucleotide
caaaatatatccagctttgattctga

SEQ ID NO: 3079 - DNA, 18 bp, Artificial Sequence
  Description of Artificial Sequence: Synthetic oligonucleotide
gcacggcaacacattgaa

SEQ ID NO: 3080 - DNA, 18 bp, Artificial Sequence
  Description of Artificial Sequence: Synthetic oligonucleotide
agcgtggagcgttgttgc

SEQ ID NO: 3081 - DNA, 21 bp, Artificial Sequence
  Description of Artificial Sequence: Synthetic oligonucleotide
gaatgtgacagcaacacgatg

SEQ ID NO: 3082 - DNA, 18 bp, Artificial Sequence
  Description of Artificial Sequence: Synthetic oligonucleotide
gtgcttgtggcctctcgt

SEQ ID NO: 3083 - DNA, 19 bp, Artificial Sequence
  Description of Artificial Sequence: Synthetic oligonucleotide
ttcggctgttccagacctg

SEQ ID NO: 3084 - DNA, 24 bp, Artificial Sequence
  Description of Artificial Sequence: Synthetic oligonucleotide
gcggtcgaaattctgggtttgaaa

SEQ ID NO: 3085 - DNA, 21 bp, Artificial Sequence
  Description of Artificial Sequence: Synthetic oligonucleotide
gcctcggcccatgagtttaag

SEQ ID NO: 3086 - DNA, 21 bp, Artificial Sequence
  Description of Artificial Sequence: Synthetic oligonucleotide
cacacttggcacagctcatgg

SEQ ID NO: 3087 - DNA, 21 bp, Artificial Sequence
  Description of Artificial Sequence: Synthetic oligonucleotide
gctccatgcctcctgaacttc

SEQ ID NO: 3088 - DNA, 25 bp, Artificial Sequence
  Description of Artificial Sequence: Synthetic oligonucleotide
catccatggaccaagaatctgaaac

SEQ ID NO: 3089 - DNA, 21 bp, Artificial Sequence
  Description of Artificial Sequence: Synthetic oligonucleotide
ttcccttcttcgtgcatggac

SEQ ID NO: 3090 - DNA, 18 bp, Artificial Sequence
  Description of Artificial Sequence: Synthetic oligonucleotide
tggcaggactcccagctc

SEQ ID NO: 3091 - DNA, 24 bp, Artificial Sequence
  Description of Artificial Sequence: Synthetic oligonucleotide
tcaccagatgtcttgtcttttcca

SEQ ID NO: 3092 - DNA, 24 bp, Artificial Sequence
  Description of Artificial Sequence: Synthetic oligonucleotide
ccaaagcaatattcgacagcctca

SEQ ID NO: 3093 - DNA, 20 bp, Artificial Sequence
  Description of Artificial Sequence: Synthetic oligonucleotide
tggaggtacgccttgcaaga

SEQ ID NO: 3094 - DNA, 19 bp, Artificial Sequence
  Description of Artificial Sequence: Synthetic oligonucleotide
tgcctgaagtttctatttc

SEQ ID NO: 3095 - DNA, 23 bp, Artificial Sequence
  Description of Artificial Sequence: Synthetic oligonucleotide
gcttctgtgccctcctcaaatac

SEQ ID NO: 3096 - DNA, 21 bp, Artificial Sequence
  Description of Artificial Sequence: Synthetic oligonucleotide
gcacacctcaccaaacccttc

SEQ ID NO: 3097 - DNA, 24 bp, Artificial Sequence
  Description of Artificial Sequence: Synthetic oligonucleotide
gaggaaacactgcttgtgacaaca

SEQ ID NO: 3098 - DNA, 25 bp, Artificial Sequence
  Description of Artificial Sequence: Synthetic oligonucleotide
tgtcgcaggcattactaatctgaaa

SEQ ID NO: 3099 - DNA, 25 bp, Artificial Sequence
  Description of Artificial Sequence: Synthetic oligonucleotide
ggagagttgaagatcgtttggtttc

SEQ ID NO: 3100 - DNA, 25 bp, Artificial Sequence
  Description of Artificial Sequence: Synthetic oligonucleotide
tctcgggaagaggaactaacgataa

SEQ ID NO: 3101 - DNA, 18 bp, Artificial Sequence
  Description of Artificial Sequence: Synthetic oligonucleotide
catggtcggatggcacgg

SEQ ID NO: 3102 - DNA, 18 bp, Artificial Sequence
  Description of Artificial Sequence: Synthetic oligonucleotide
gtgaccgtgggcacgaag

SEQ ID NO: 3103 - DNA, 18 bp, Artificial Sequence
  Description of Artificial Sequence: Synthetic oligonucleotide
cacagggcgaggctcatc

SEQ ID NO: 3104 - DNA, 25 bp, Artificial Sequence
  Description of Artificial Sequence: Synthetic oligonucleotide
ggcttttgtgttgatcttgacaagg

SEQ ID NO: 3105 - DNA, 19 bp, Artificial Sequence
  Description of Artificial Sequence: Synthetic oligonucleotide
gatgccctctccaccatgg

SEQ ID NO: 3106 - DNA, 22 bp, Artificial Sequence
  Description of Artificial Sequence: Synthetic oligonucleotide
cccaggctctcctagtctttcc

SEQ ID NO: 3107 - DNA, 24 bp, Artificial Sequence
  Description of Artificial Sequence: Synthetic oligonucleotide
ccatgtgtgtagcttcagcttgtc

SEQ ID NO: 3108 - DNA, 20 bp, Artificial Sequence
  Description of Artificial Sequence: Synthetic oligonucleotide
agggtgtgggctgtacacaa

SEQ ID NO: 3109 - DNA, 24 bp, Artificial Sequence
  Description of Artificial Sequence: Synthetic oligonucleotide
gcggcataagtacagagggaaatg

SEQ ID NO: 3110 - DNA, 25 bp, Artificial Sequence
  Description of Artificial Sequence: Synthetic oligonucleotide
ccttccttctggtcagttggatttg

SEQ ID NO: 3111 - DNA, 22 bp, Artificial Sequence
  Description of Artificial Sequence: Synthetic oligonucleotide
gcgtcttctccatggtgatctg

SEQ ID NO: 3112 - DNA, 18 bp, Artificial Sequence
  Description of Artificial Sequence: Synthetic oligonucleotide
ggtccgagtggctggaga

SEQ ID NO: 3113 - DNA, 23 bp, Artificial Sequence
  Description of Artificial Sequence: Synthetic oligonucleotide
gttcctcttctccttcgcctttg

SEQ ID NO: 3114 - DNA, 24 bp, Artificial Sequence
  Description of Artificial Sequence: Synthetic oligonucleotide
gggtcatatcttcctgcaagccta

SEQ ID NO: 3115 - DNA, 18 bp, Artificial Sequence
  Description of Artificial Sequence: Synthetic oligonucleotide
accgtcacgttcgccatg

SEQ ID NO: 3116 - DNA, 23 bp, Artificial Sequence
  Description of Artificial Sequence: Synthetic oligonucleotide
gcagtttaccttcacattccatt

SEQ ID NO: 3117 - DNA, 22 bp, Artificial Sequence
  Description of Artificial Sequence: Synthetic oligonucleotide
cagaatagagacattgccctcc

SEQ ID NO: 3118 - DNA, 20 bp, Artificial Sequence
  Description of Artificial Sequence: Synthetic oligonucleotide
gtggttcccaatcaggttgt

SEQ ID NO: 3119 - DNA, 22 bp, Artificial Sequence
  Description of Artificial Sequence: Synthetic oligonucleotide
gtcagtggaattgagtaggacg

SEQ ID NO: 3120 - DNA, 25 bp, Artificial Sequence
  Description of Artificial Sequence: Synthetic oligonucleotide
accaccactgacatgatcttctttc

SEQ ID NO: 3121 - DNA, 20 bp, Artificial Sequence
  Description of Artificial Sequence: Synthetic oligonucleotide
tctggtcatctgggcttttc

SEQ ID NO: 3122 - DNA, 18 bp, Artificial Sequence
  Description of Artificial Sequence: Synthetic oligonucleotide
cgcagtgacctggaggat

SEQ ID NO: 3123 - DNA, 18 bp, Artificial Sequence
  Description of Artificial Sequence: Synthetic oligonucleotide
cccaggactaggcaggtg

SEQ ID NO: 3124 - DNA, 22 bp, Artificial Sequence
  Description of Artificial Sequence: Synthetic oligonucleotide
tcattcctttcatcttccagcc

SEQ ID NO: 3125 - DNA, 23 bp, Artificial Sequence
  Description of Artificial Sequence: Synthetic oligonucleotide
cagccaaatttgtccacgagtca

SEQ ID NO: 3126 - DNA, 17 bp, Artificial Sequence
  Description of Artificial Sequence: Synthetic oligonucleotide
cgggtctctgggaaagc

SEQ ID NO: 3127 - DNA, 21 bp, Artificial Sequence
  Description of Artificial Sequence: Synthetic oligonucleotide
cttggacagcccagtgtagat

SEQ ID NO: 3128 - DNA, 20 bp, Artificial Sequence
  Description of Artificial Sequence: Synthetic oligonucleotide
cagaactccacgatgtcagg

SEQ ID NO: 3129 - DNA, 22 bp, Artificial Sequence
  Description of Artificial Sequence: Synthetic oligonucleotide
ctgactatacttgccgatccac

SEQ ID NO: 3130 - DNA, 23 bp, Artificial Sequence
  Description of Artificial Sequence: Synthetic oligonucleotide
tgctctatgagcatattccaatg

SEQ ID NO: 3131 - DNA, 19 bp, Artificial Sequence
  Description of Artificial Sequence: Synthetic oligonucleotide
acctcccagaaggcagaga

SEQ ID NO: 3132 - DNA, 18 bp, Artificial Sequence
  Description of Artificial Sequence: Synthetic oligonucleotide
cagatgccggttcagctc

SEQ ID NO: 3133 - DNA, 20 bp, Artificial Sequence
  Description of Artificial Sequence: Synthetic oligonucleotide
tgtctttgagatgtccctgc

SEQ ID NO: 3134 - DNA, 22 bp, Artificial Sequence
  Description of Artificial Sequence: Synthetic oligonucleotide
agcctagactctgttggacacc

SEQ ID NO: 3135 - DNA, 20 bp, Artificial Sequence
  Description of Artificial Sequence: Synthetic oligonucleotide
gggacctccaaacaaaaagg

SEQ ID NO: 3136 - DNA, 20 bp, Artificial Sequence
  Description of Artificial Sequence: Synthetic oligonucleotide
gttgtcgatgtcccggaatt

SEQ ID NO: 3137 - DNA, 18 bp, Artificial Sequence
  Description of Artificial Sequence: Synthetic oligonucleotide
cctggacctcagccatga

SEQ ID NO: 3138 - DNA, 20 bp, Artificial Sequence
  Description of Artificial Sequence: Synthetic oligonucleotide
tgtacggtctgctcactgct

SEQ ID NO: 3139 - DNA, 21 bp, Artificial Sequence
  Description of Artificial Sequence: Synthetic oligonucleotide
gatgcacagagtagagccttg

SEQ ID NO: 3140 - DNA, 20 bp, Artificial Sequence
  Description of Artificial Sequence: Synthetic oligonucleotide
tggcctcagatttcaactcg

SEQ ID NO: 3141 - DNA, 20 bp, Artificial Sequence
  Description of Artificial Sequence: Synthetic oligonucleotide
agggaaggatttcaactggg

SEQ ID NO: 3142 - DNA, 18 bp, Artificial Sequence
  Description of Artificial Sequence: Synthetic oligonucleotide
caggaagggcatcagtgg

SEQ ID NO: 3143 - DNA, 23 bp, Artificial Sequence
  Description of Artificial Sequence: Synthetic oligonucleotide
cgtgaaagttgcagttttactcc

SEQ ID NO: 3144 - DNA, 20 bp, Artificial Sequence
  Description of Artificial Sequence: Synthetic oligonucleotide
ctcgccatcagagaagtccc

SEQ ID NO: 3145 - DNA, 20 bp, Artificial Sequence
  Description of Artificial Sequence: Synthetic oligonucleotide
atgtttcaaaggcctccaga

SEQ ID NO: 3146 - DNA, 21 bp, Artificial Sequence
  Description of Artificial Sequence: Synthetic oligonucleotide
tggagggtctgcaataatctg

SEQ ID NO: 3147 - DNA, 22 bp, Artificial Sequence
  Description of Artificial Sequence: Synthetic oligonucleotide
tgaggttctgaaggcctaaatc

SEQ ID NO: 3148 - DNA, 19 bp, Artificial Sequence
  Description of Artificial Sequence: Synthetic oligonucleotide
cgggaagcacctgtggttc

SEQ ID NO: 3149 - DNA, 20 bp, Artificial Sequence
  Description of Artificial Sequence: Synthetic oligonucleotide
ttcagtcttgtgcttccgtc

SEQ ID NO: 3150 - DNA, 21 bp, Artificial Sequence
  Description of Artificial Sequence: Synthetic oligonucleotide
agcaagatcacgcttttgttc

SEQ ID NO: 3151 - DNA, 18 bp, Artificial Sequence
  Description of Artificial Sequence: Synthetic oligonucleotide
cttcttgtgctctaggat

SEQ ID NO: 3152 - DNA, 17 bp, Artificial Sequence
  Description of Artificial Sequence: Synthetic oligonucleotide
cccagcaggacgggagc

SEQ ID NO: 3153 - DNA, 19 bp, Artificial Sequence
  Description of Artificial Sequence: Synthetic oligonucleotide
gaacatgtctgcgtatctc

SEQ ID NO: 3154 - DNA, 19 bp, Artificial Sequence
  Description of Artificial Sequence: Synthetic oligonucleotide
gaacatgtctgcgtatctc

1-53. (canceled)

54. A method of treating cancer in a subject comprising:
(a) measuring an expression level of at least one gene selected from CAP6, THBS4, PLP1, MT1A, MIR205HG, SEMG1, RSPO3, AN07, PCP4, ANKRD1, MYBPC, MMP7, SERPINA3, SELE, KRT5, LTF, KIAA120, TMEM158, ZFP36, FOSB, PCA3, TRPM8, PTTG1, PAGE4, STEAP4, TMEM178A, CXCL2, HS3ST3A1, EYA1, RSPO2, PKP1, MUC6, PENK, DEFB1, SLC7A3, MIR578, PI15, UBXN10-AS1, PDK4, PHGR1, SERPINE1, PDZRN4, ZNF185, ADRA2C, AZGP1, TK1, POTEH, KIF11, CLDN1, MIR4530, MAFF, ZNF765, CKS2, TCEAL7, PLIN1, SIGLEC1, FAM15, MFAP5, SFRP1, DUSP5, VARS2, ABCC4, SH3BP4, SORD, MTERFD1, DPP4, FAM3B, KLK3, a gene comprising any one of SEQ ID NOs: 32, 96, 97, 112-114, 120, 121, 132, 141, 149, 185, 186, 210, 211, 213, 214, 221, 264, 328, 329, 344-346, 352, 353, 364, 373, 381, 417, 418, 442, 443, 445, 446 and 453, and a gene comprising any one of SEQ ID NOs: 133 and 365 in a sample from the subject;
(b) providing a signature score based on the measured expression level, wherein the signature score is
(i) a single signature score if the at least one gene consists of one gene, or
(ii) a combined signature score if the at least one gene consists of two or more genes;
(c) determining if the signature score is a positive signature score, wherein the signature score is a positive signature score if
(i) the single signature score is higher than a gene with a positive weight,
(ii) the single signature score is lower than a gene with a negative weight, or
(iii) the combined signature score is equal to or higher than a pre-determined threshold score;
wherein a positive signature score indicates an increased likelihood of recurrence and/or an increased likelihood of metastasis and/or a poor prognosis;
(e) treating the subject who has a positive signature score with one or more of an anti-hormone treatment, a cytotoxic agent, a biologic, radiotherapy, a targeted therapy, or surgery.

55. The method of claim 54, wherein the anti-hormone treatment comprises bicalutamide and/or abiraterone

56. The method of claim 54, wherein the cytotoxic agent is selected from cisplatin, carboplatin, oxaliplatin, paclitaxel, and docetaxel.

57. The method a claim 54, wherein the biologic is Sipuleucel-T.

58. The method of claim 54, wherein the radiotherapy is extended-field radiotherapy.

59. The method of claim 54, wherein measuring the expression level of the at least one gene comprises measuring the expression level of all of CAP6, THBS4, PLP1, MT1A, MIR205HG, SEMG1, RSPO3, AN07, PCP4, ANKRD1, MYBPC, MMP7, SERPINA3, SELE, KRT5, LTF, KIAA120, TMEM158, ZFP36, FOSB, PCA3, TRPM8, PTTG1, PAGE4, STEAP4, TMEM178A, CXCL2, HS3ST3A1, EYA1, RSPO2, PKP1, MUC6, PENK, DEFB1, SLC7A3, MIR578, PI15, UBXN10-AS1, PDK4, PHGR1, SERPINE1, PDZRN4, ZNF185, ADRA2C, AZGP1, TK1, POTEH, KIF11, CLDN1, MIR4530, MAFF, ZNF765, CKS2, TCEAL7, PLIN1, SIGLEC1, FAM15, MFAP5, SFRP1, DUSP5, VARS2, ABCC4, SH3BP4, SORD, MTERFD1, DPP4, FAM3B, KLK3, a gene comprising any one of SEQ ID NOs: 32, 96, 97, 112-114, 120, 121, 132, 141, 149, 185, 186, 210, 211, 213, 214, 221, 264, 328, 329, 344-346, 352, 353, 364, 373, 381, 417, 418, 442, 443, 445, 446 and 453, and a gene comprising any one of SEQ ID NOs: 133 and 365.

60. The method of claim 54, further comprising separately determining prostate-specific antigen (PSA) levels and/or a Gleason score in the subject, wherein the PSA levels and/or Gleason score is used in combination with the signature score to select a therapy.

61. The method of claim 54, wherein the cancer is prostate cancer or estrogen receptor-positive breast cancer.

62. The method of claim 54, wherein measuring the expression level comprises using at least one primer pair and/or at least one probe that hybridizes with the at least one gene.

63. The method of claim 54, wherein the pre-determined threshold scored is obtained by measuring an expression level of the at least one gene in one or more control samples.

64. The method of claim 54, wherein the expression level is measured by microarray, northern blotting, RNA sequencing, in situ RNA detection or nucleic acid amplification.

65. The method of claim 54, wherein the sample comprises (i) prostate cells and/or prostate tissue or (ii) breast cells and/or breast tissue.

66. The method of claim 54, wherein the sample is a formalin-fixed paraffin-embedded biopsy sample or a resection sample.

67. A system for characterizing and/or prognosing cancer in a subject, comprising:
(a) one or more testing devices for measuring an expression level of at least one gene selected from CAP6, THBS4, PLP1, MT1A, MIR205HG, SEMG1, RSPO3, AN07, PCP4, ANKRD1, MYBPC, MMP7, SERPINA3, SELE, KRT5, LTF, KIAA120, TMEM158, ZFP36, FOSB, PCA3, TRPM8, PTTG1, PAGE4, STEAP4, TMEM178A, CXCL2, HS3ST3A1, EYA1, RSPO2, PKP1, MUC6, PENK, DEFB1, SLC7A3, MIR578, PI15, UBXN10-AS1, PDK4, PHGR1, SERPINE1, PDZRN4, ZNF185, ADRA2C, AZGP1, TK1, POTEH, KIF11, CLDN1, MIR4530, MAFF, ZNF765, CKS2, TCEAL7, PLIN1, SIGLEC1, FAM15, MFAP5, SFRP1, DUSP5, VARS2, ABCC4, SH3BP4, SORD, MTERFD1, DPP4, FAM3B, KLK3, a gene comprising anyone of SEQ ID NOs: 32, 96, 97, 112-114, 120, 121, 132, 141, 149, 185, 186, 210, 211, 213, 214, 221, 264, 328, 329, 344-346, 352, 353, 364, 373, 381, 417, 418, 442, 443, 445, 446 and 453, and a gene comprising any one of SEQ ID NOs: 133 and 365, in a sample from a subject;
(b) a storage medium comprising instructions; and
(c) a processor configured to execute the instructions to perform operations comprising:
(i) accessing from the one or more testing devices the measured expression level of the at least one gene;
(ii) providing a signature score based on the measured expression level, wherein the signature score is
a single signature score if the at least one gene consists of one gene, or
a combined signature score if the at least one gene consists of two or more genes;
(iii) determining if the signature score is a positive signature score, wherein the signature score is a positive signature score if
the single signature score is higher than a gene with a positive weight,
the single signature score is lower than a gene with a negative weight, or
the combined signature score is equal to or higher than a pre-determined threshold score;
wherein a positive signature score indicates an increased likelihood of recurrence and/or an increased likelihood of metastasis and/or a poor prognosis;
(iv) outputting the positive signature score.

68. The system of claim 67, further comprising a display for outputting the positive signature score.

69. A kit for characterizing and/or prognosing cancer in a subject comprising one or more oligonucleotide probes that specifically hybridize with a full sequence, a target sequence, or an RNA product of at least one gene selected from CAP6, THBS4, PLP1, MT1A, MIR205HG, SEMG1, RSPO3, AN07, PCP4, ANKRD1, MYBPC, MMP7, SERPINA3, SELE, KRT5, LTF, KIAA120, TMEM158, ZFP36, FOSB, PCA3, TRPM8, PTTG1, PAGE4, STEAP4, TMEM178A, CXCL2, HS3ST3A1, EYA1, RSPO2, PKP1, MUC6, PENK, DEFB1, SLC7A3, MIR578, PI15, UBXN10-AS1, PDK4, PHGR1, SERPINE1, PDZRN4, ZNF185, ADRA2C, AZGP1, TK1, POTEH, KIF11, CLDN1, MIR4530, MAFF, ZNF765, CKS2, TCEAL7, PLIN1, SIGLEC1, FAM15, MFAP5, SFRP1, DUSP5, VARS2, ABCC4, SH3BP4, SORD, MTERFD1, DPP4, FAM3B, KLK3, a gene comprising any one of SEQ ID NOs: 32, 96, 97, 112-114, 120, 121, 132, 141, 149, 185, 186, 210, 211, 213, 214, 221, 264, 328, 329, 344-346, 352, 353, 364, 373, 381, 417, 418, 442, 443, 445, 446 and 453, and a gene comprising any one of SEQ ID NOs: 133 and 365, and further comprising one or more of:
a) a blocking probe,
b) a pre-amplifier,
c) an amplifier, and
d) a label molecule.

70. The kit of claim 69, wherein the at least one gene consists of all of CAP6, THBS4, PLP1, MT1A, MIR205HG, SEMG1, RSPO3, AN07, PCP4, ANKRD1, MYBPC, MMP7, SERPINA3, SELE, KRT5, LTF, KIAA120, TMEM158, ZFP36, FOSB, PCA3, TRPM8, PTTG1, PAGE4, STEAP4, TMEM178A, CXCL2, HS3ST3A1, EYA1, RSPO2, PKP1, MUC6, PENK, DEFB1, SLC7A3, MIR578, PI15, UBXN10-AS1, PDK4, PHGR1, SERPINE1, PDZRN4, ZNF185, ADRA2C, AZGP1, TK1, POTEH, KIF11, CLDN1, MIR4530, MAFF, ZNF765, CKS2, TCEAL7, PLIN1, SIGLEC1, FAM15, MFAP5, SFRP1, DUSP5, VARS2, ABCC4, SH3BP4, SORD, MTERFD1, DPP4, FAM3B, KLK3, a gene comprising any one of SEQ ID NOs: 32, 96, 97, 112-114, 120, 121, 132, 141, 149, 185, 186, 210, 211, 213, 214, 221, 264, 328, 329, 344-346, 352, 353, 364, 373, 381, 417, 418, 442, 443, 445, 446 and 453, and a gene comprising any one of SEQ ID NOs: 133 and 365.

71. The kit of claim 69, further comprising one or more primers and/or primer pairs for amplifying the full sequence or the target sequence of the at least one gene.

72. The kit of claim 71, wherein the one or more primer and/or primer pair comprise at least one nucleotide sequence selected from SEQ ID NOs: 3015-3154.
